(19) United States
(12) Patent Application Publication
(10) Pub. No.: US 2003/0166064 A1
(43) Pub. Date: Sep. 4, 2003

(54) Compositions and methods for the therapy and diagnosis of colon cancer

(75) Inventors: Gordon E. King, Shoreline, WA (US); Madeleine Joy Meagher, Seattle, WA (US); Jiangchun Xu, Bellevue, WA (US); Heather Secrist, Seattle, WA (US); Yuqiu Jiang, Kent, WA (US)

Correspondence Address: SEED INTELLECTUAL PROPERTY LAW GROUP PLLC, 701 FIFTH AVE, SUITE 6300, SEATTLE, WA, 98104-7092, US

(73) Assignee: Corixa Corporation, Seattle, WA (US)

(21) Appl. No.: 10/099,926

(22) Filed: Mar. 14, 2002

Related U.S. Application Data
(63) Continuation-in-part of application No. 10/033,528, filed on Dec. 26, 2001.
Application No. 10/033,528 is a continuation-in-part of application No. 09/920,300, filed on Jul. 31, 2001.
(60) Provisional application No. 60/302,051, filed on Jun. 29, 2001.
(60) Provisional application No. 60/279,763, filed on Mar. 28, 2001.
(60) Provisional application No. 60/223,283, filed on Aug. 3, 2000.

(51) Int. Cl. C07H 21/02; C07H 21/04; C12P 21/06

(52) U.S. Cl. 435/69.1; 536/23.1

(57) ABSTRACT

Compositions and methods for the therapy and diagnosis of cancer, particularly colon cancer, are disclosed. Illustrative compositions comprise one or more colon tumor polypeptides, immunogenic portions thereof, polynucleotides that encode such polypeptides, antigen presenting cell that expresses such polypeptides, and T cells that are specific for cells expressing such polypeptides. The disclosed compositions are useful, for example, in the diagnosis, prevention and/or treatment of diseases, particularly colon cancer.

### STATEMENT REGARDING SEQUENCE LISTING

[0001] The Sequence Listing associated with this application is provided on CD-ROM in lieu of a paper copy, and is hereby incorporated by reference into the specification. Three CD-ROMs are provided, containing identical copies of the sequence listing: CD-ROM No. 1 is labeled COPY 1, contains the file 547c2.app which is 1.21 MB and created on Mar. 14, 2002; CD-ROM No. 2 is labeled COPY 2, contains the file 547c2.app which is 1.21 MB and created on Mar. 14, 2002; CD-ROM No. 3 is labeled CRF, contains the file 547c2.app which is 1.21 MB and created on Mar. 14, 2002.

### BACKGROUND OF THE INVENTION

[0002] 1. Field of the Invention

[0003] The present invention relates generally to therapy and diagnosis of cancer, such as colon cancer. The invention is more specifically related to polypeptides, comprising at least a portion of a colon tumor protein, and to polynucleotides encoding such polypeptides. Such polypeptides and polynucleotides are useful in pharmaceutical compositions, e.g., vaccines, and other compositions for the diagnosis and treatment of colon cancer.

[0004] 2. Description of the Related Art

[0005] Cancer is a significant health problem throughout the world. Although advances have been made in detection and therapy of cancer, no vaccine or other universally successful method for prevention and/or treatment is currently available. Current therapies, which are generally based on a combination of chemotherapy or surgery and radiation, continue to prove inadequate in many patients.

[0006] Colon cancer is the second most frequently diagnosed malignancy in the United States as well as the second most common cause of cancer death. The five-year survival rate for patients with colorectal cancer detected in an early localized stage is 92%; unfortunately, only 37% of colorectal cancer is diagnosed at this stage. The survival rate drops to 64% if the cancer is allowed to spread to adjacent organs or lymph nodes, and to 7% in patients with distant metastases.

[0007] The prognosis of colon cancer is directly related to the degree of penetration of the tumor through the bowel wall and the presence or absence of nodal involvement, consequently, early detection and treatment are especially important. Currently, diagnosis is aided by the use of screening assays for fecal occult blood, sigmoidoscopy, colonoscopy and double contrast barium enemas. Treatment regimens are determined by the type and stage of the cancer, and include surgery, radiation therapy and/or chemotherapy. Recurrence following surgery (the most common form of therapy) is a major problem and is often the ultimate cause of death. In spite of considerable research into therapies for the disease, colon cancer remains difficult to diagnose and treat. In spite of considerable research into therapies for these and other cancers, colon cancer remains difficult to diagnose and treat effectively. Accordingly, there is a need in the art for improved methods for detecting and treating such cancers. The present invention fulfills these needs and further provides other related advantages.

[0008] In spite of considerable research into therapies for these and other cancers, colon cancer remains difficult to diagnose and treat effectively. Accordingly, there is a need in the art for improved methods for detecting and treating such cancers. The present invention fulfills these needs and further provides other related advantages.

### BRIEF SUMMARY OF THE INVENTION

[0009] In one aspect, the present invention provides polynucleotide compositions comprising a sequence selected from the group consisting of:

[0010] (a) sequences provided in SEQ ID NOs:1-1788 and 1790-1981;

[0011] (b) complements of the sequences provided in SEQ ID NOs:1-1788 and 1790-1981;

[0012] (c) sequences consisting of at least 20, 25, 30, 35, 40, 45, 50, 75 and 100 contiguous residues of a sequence provided in SEQ ID NOs:1-1788 and 1790-1981;

[0013] (d) sequences that hybridize to a sequence provided in SEQ ID NOs:1-1788 and 1790-1981, under moderate or highly stringent conditions;

[0014] (e) sequences having at least 75%, 80%, 85%, 90%, 95%, 96%, 97%, 98% or 99% identity to a sequence of SEQ ID NOs:1-1788 and 1790-1981;

[0015] (f) degenerate variants of a sequence provided in SEQ ID NOs:1-1788 and 1790-1981.

[0016] In one preferred embodiment, the polynucleotide compositions of the invention are expressed in at least about 20%, more preferably in at least about 30%, and most preferably in at least about 50% of colon tumor samples tested, at a level that is at least about 2-fold, preferably at least about 5-fold, and most preferably at least about 10-fold higher than that for normal tissues.

[0017] The present invention, in another aspect, provides polypeptide compositions comprising an amino acid sequence that is encoded by a polynucleotide sequence described above.

[0018] The present invention further provides polypeptide compositions comprising an amino acid sequence selected from the group consisting of sequences recited in SEQ ID NOs:1789 and 1982.

[0019] In certain preferred embodiments, the polypeptides and/or polynucleotides of the present invention are immunogenic, i.e., they are capable of eliciting an immune response, particularly a humoral and/or cellular immune response, as further described herein.

[0020] The present invention further provides fragments, variants and/or derivatives of the disclosed polypeptide and/or polynucleotide sequences, wherein the fragments, variants and/or derivatives preferably have a level of immunogenic activity of at least about 50%, preferably at least about 70% and more preferably at least about 90% of the level of immunogenic activity of a polypeptide sequence set forth in SEQ ID NOs:1789 and 1982 or a polypeptide sequence encoded by a polynucleotide sequence set forth in SEQ ID NOs:1-1788 and 1790-1981.

[0021] The present invention further provides polynucleotides that encode a polypeptide described above, expression vectors comprising such polynucleotides and host cells transformed or transfected with such expression vectors.

[0022] Within other aspects, the present invention provides pharmaceutical compositions comprising a polypeptide or polynucleotide as described above and a physiologically acceptable carrier.

[0023] Within a related aspect of the present invention, the pharmaceutical compositions, e.g., vaccine compositions, are provided for prophylactic or therapeutic applications. Such compositions generally comprise an immunogenic polypeptide or polynucleotide of the invention and an immunostimulant, such as an adjuvant.

[0024] The present invention further provides pharmaceutical compositions that comprise: (a) an antibody or antigen-binding fragment thereof that specifically binds to a polypeptide of the present invention, or a fragment thereof; and (b) a physiologically acceptable carrier.

[0025] Within further aspects, the present invention provides pharmaceutical compositions comprising: (a) an antigen presenting cell that expresses a polypeptide as described above and (b) a pharmaceutically acceptable carrier or excipient. Illustrative antigen presenting cells include dendritic cells, macrophages, monocytes, fibroblasts and B cells.

[0026] Within related aspects, pharmaceutical compositions are provided that comprise: (a) an antigen presenting cell that expresses a polypeptide as described above and (b) an immunostimulant.

[0027] The present invention further provides, in other aspects, fusion proteins that comprise at least one polypeptide as described above, as well as polynucleotides encoding such fusion proteins, typically in the form of pharmaceutical compositions, e.g., vaccine compositions, comprising a physiologically acceptable carrier and/or an immunostimulant. The fusions proteins may comprise multiple immunogenic polypeptides or portions/variants thereof, as described herein, and may further comprise one or more polypeptide segments for facilitating the expression, purification and/or immunogenicity of the polypeptide(s).

[0028] Within further aspects, the present invention provides methods for stimulating an immune response in a patient, preferably a T cell response in a human patient, comprising administering a pharmaceutical composition described herein. The patient may be afflicted with colon cancer, in which case the methods provide treatment for the disease, or patient considered at risk for such a disease may be treated prophylactically.

[0029] Within further aspects, the present invention provides methods for inhibiting the development of a cancer in a patient, comprising administering to a patient a pharmaceutical composition as recited above. The patient may be afflicted with colon cancer, in which case the methods provide treatment for the disease, or patient considered at risk for such a disease may be treated prophylactically.

[0030] The present invention further provides, within other aspects, methods for removing tumor cells from a biological sample, comprising contacting a biological sample with T cells that specifically react with a polypeptide of the present invention, wherein the step of contacting is performed under conditions and for a time sufficient to permit the removal of cells expressing the protein from the sample.

[0031] Within related aspects, methods are provided for inhibiting the development of a cancer in a patient, comprising administering to a patient a biological sample treated as described above.

[0032] Methods are further provided, within other aspects, for stimulating and/or expanding T cells specific for a polypeptide of the present invention, comprising contacting T cells with one or more of: (i) a polypeptide as described above; (ii) a polynucleotide encoding such a polypeptide; and/or (iii) an antigen presenting cell that expresses such a polypeptide; under conditions and for a time sufficient to permit the stimulation and/or expansion of T cells. Isolated T cell populations comprising T cells prepared as described above are also provided.

[0033] Within further aspects, the present invention provides methods for inhibiting the development of a cancer in a patient, comprising administering to a patient an effective amount of a T cell population as described above.

[0034] The present invention further provides methods for inhibiting the development of a cancer in a patient, comprising the steps of: (a) incubating CD⁴⁺ and/or CD⁸⁺ T cells isolated from a patient with one or more of: (i) a polypeptide comprising at least an immunogenic portion of polypeptide disclosed herein; (ii) a polynucleotide encoding such a polypeptide; and (iii) an antigen-presenting cell that expressed such a polypeptide; and (b) administering to the patient an effective amount of the proliferated T cells, and thereby inhibiting the development of a cancer in the patient. Proliferated cells may, but need not, be cloned prior to administration to the patient.

[0035] Within further aspects, the present invention provides methods for determining the presence or absence of a cancer, preferably a colon cancer, in a patient comprising: (a) contacting a biological sample obtained from a patient with a binding agent that binds to a polypeptide as recited above; (b) detecting in the sample an amount of polypeptide that binds to the binding agent; and (c) comparing the amount of polypeptide with a predetermined cut-off value, and therefrom determining the presence or absence of a cancer in the patient. Within preferred embodiments, the binding agent is an antibody, more preferably a monoclonal antibody.

[0036] The present invention also provides, within other aspects, methods for monitoring the progression of a cancer in a patient. Such methods comprise the steps of: (a) contacting a biological sample obtained from a patient at a first point in time with a binding agent that binds to a polypeptide as recited above; (b) detecting in the sample an amount of polypeptide that binds to the binding agent; (c) repeating steps (a) and (b) using a biological sample obtained from the patient at a subsequent point in time; and (d) comparing the amount of polypeptide detected in step (c) with the amount detected in step (b) and therefrom monitoring the progression of the cancer in the patient.

[0037] The present invention further provides, within other aspects, methods for determining the presence or absence of a cancer in a patient, comprising the steps of: (a) contacting a biological sample, e.g., tumor sample, serum sample, etc., obtained from a patient with an oligonucleotide that hybridizes to a polynucleotide that encodes a polypeptide of the present invention; (b) detecting in the sample a level of a polynucleotide, preferably mRNA, that hybridizes to the oligonucleotide; and (c) comparing the level of polynucleotide that hybridizes to the oligonucleotide with a predetermined cut-off value, and therefrom determining the presence or absence of a cancer in the patient. Within certain embodiments, the amount of mRNA is detected via polymerase chain reaction using, for example, at least one oligonucleotide primer that hybridizes to a polynucleotide encoding a polypeptide as recited above, or a complement of such a polynucleotide. Within other embodiments, the amount of mRNA is detected using a hybridization technique, employing an oligonucleotide probe that hybridizes to a polynucleotide that encodes a polypeptide as recited above, or a complement of such a polynucleotide.

[0038] In related aspects, methods are provided for monitoring the progression of a cancer in a patient, comprising the steps of: (a) contacting a biological sample obtained from a patient with an oligonucleotide that hybridizes to a polynucleotide that encodes a polypeptide of the present invention; (b) detecting in the sample an amount of a polynucleotide that hybridizes to the oligonucleotide; (c) repeating steps (a) and (b) using a biological sample obtained from the patient at a subsequent point in time; and (d) comparing the amount of polynucleotide detected in step (c) with the amount detected in step (b) and therefrom monitoring the progression of the cancer in the patient.

[0039] Within further aspects, the present invention provides antibodies, such as monoclonal antibodies, that bind to a polypeptide as described above, as well as diagnostic kits comprising such antibodies. Diagnostic kits comprising one or more oligonucleotide probes or primers as described above are also provided.

[0040] These and other aspects of the present invention will become apparent upon reference to the following detailed description. All references disclosed herein are hereby incorporated by reference in their entirety as if each was incorporated individually.

### BRIEF DESCRIPTION OF THE SEQUENCE IDENTIFIERS

[0041] SEQ ID NO:1 is the determined cDNA sequence for clone ‘58123.1’.

[0042] SEQ ID NO:2 is the determined cDNA sequence for clone ‘58124.1’.

[0043] SEQ ID NO:3 is the determined cDNA sequence for clone ‘58125.1’.

[0044] SEQ ID NO:4 is the determined cDNA sequence for clone ‘58126.1’.

[0045] SEQ ID NO:5 is the determined cDNA sequence for clone ‘58127.1’.

[0046] SEQ ID NO:6 is the determined cDNA sequence for clone ‘58128.1’.

[0047] SEQ ID NO:7 is the determined cDNA sequence for clone ‘58130.1’.

[0048] SEQ ID NO:8 is the determined cDNA sequence for clone ‘58131.1’.

[0049] SEQ ID NO:9 is the determined cDNA sequence for clone ‘58132.1’.

[0050] SEQ ID NO:10 is the determined cDNA sequence for clone ‘58133.1’.

[0051] SEQ ID NO:11 is the determined cDNA sequence for clone ‘58135.1’.

[0052] SEQ ID NO:12 is the determined cDNA sequence for clone ‘58136.1’.

[0053] SEQ ID NO:13 is the determined cDNA sequence for clone ‘58138.1’.

[0054] SEQ ID NO:14 is the determined cDNA sequence for clone ‘58139.1’.

[0055] SEQ ID NO:15 is the determined cDNA sequence for clone ‘58141.1’.

[0056] SEQ ID NO:16 is the determined cDNA sequence for clone ‘58142.1’.

[0057] SEQ ID NO:17 is the determined cDNA sequence for clone ‘58143.1’.

[0058] SEQ ID NO:18 is the determined cDNA sequence for clone ‘58144.1’.

[0059] SEQ ID NO:19 is the determined cDNA sequence for clone ‘58148.1’.

[0060] SEQ ID NO:20 is the determined cDNA sequence for clone ‘58149.1’.

[0061] SEQ ID NO:21 is the determined cDNA sequence for clone ‘58150.1’.

[0062] SEQ ID NO:22 is the determined cDNA sequence for clone ‘58151.1’.

[0063] SEQ ID NO:23 is the determined cDNA sequence for clone ‘58153.1’.

[0064] SEQ ID NO:24 is the determined cDNA sequence for clone ‘58154.1’.

[0065] SEQ ID NO:25 is the determined cDNA sequence for clone ‘58155.1’.

[0066] SEQ ID NO:26 is the determined cDNA sequence for clone ‘58156.1’.

[0067] SEQ ID NO:27 is the determined cDNA sequence for clone ‘58159.1’.

[0068] SEQ ID NO:28 is the determined cDNA sequence for clone ‘58161.1’.

[0069] SEQ ID NO:29 is the determined cDNA sequence for clone ‘58163.1’.

[0070] SEQ ID NO:30 is the determined cDNA sequence for clone ‘58164.1’.

[0071] SEQ ID NO:31 is the determined cDNA sequence for clone ‘58165.1’.

[0072] SEQ ID NO:32 is the determined cDNA sequence for clone ‘58166.1’.

[0073] SEQ ID NO:33 is the determined cDNA sequence for clone ‘58167.1’.

[0074] SEQ ID NO:34 is the determined cDNA sequence for clone ‘58169.1’.

[0075] SEQ ID NO:35 is the determined cDNA sequence for clone ‘58170.1’.

[0076] SEQ ID NO:36 is the determined cDNA sequence for clone ‘58171.1’.

[0077] SEQ ID NO:37 is the determined cDNA sequence for clone ‘58172.1’.

[0078] SEQ ID NO:38 is the determined cDNA sequence for clone ‘58174.1’.

[0079] SEQ ID NO:39 is the determined cDNA sequence for clone ‘58176.1’.

[0080] SEQ ID NO:40 is the determined cDNA sequence for clone ‘58177.1’.

[0081] SEQ ID NO:41 is the determined cDNA sequence for clone ‘58178.1’.

[0082] SEQ ID NO:42 is the determined cDNA sequence for clone ‘58183.1’.

[0083] SEQ ID NO:43 is the determined cDNA sequence for clone ‘58185.1’.

[0084] SEQ ID NO:44 is the determined cDNA sequence for clone ‘58186.1’.

[0085] SEQ ID NO:45 is the determined cDNA sequence for clone ‘58189.1’.

[0086] SEQ ID NO:46 is the determined cDNA sequence for clone ‘58190.1’.

[0087] SEQ ID NO:47 is the determined cDNA sequence for clone ‘58194.1’.

[0088] SEQ ID NO:48 is the determined cDNA sequence for clone ‘58196.1’.

[0089] SEQ ID NO:49 is the determined cDNA sequence for clone ‘58203.1’.

[0090] SEQ ID NO:50 is the determined cDNA sequence for clone ‘58204.1’.

[0091] SEQ ID NO:51 is the determined cDNA sequence for clone ‘58205.1’.

[0092] SEQ ID NO:52 is the determined cDNA sequence for clone ‘58206.1’.

[0093] SEQ ID NO:53 is the determined cDNA sequence for clone ‘58208.1’.

[0094] SEQ ID NO:54 is the determined cDNA sequence for clone ‘58214.1’.

[0095] SEQ ID NO:55 is the determined cDNA sequence for clone ‘58215.1’.

[0096] SEQ ID NO:56 is the determined cDNA sequence for clone ‘58216.1’.

[0097] SEQ ID NO:57 is the determined cDNA sequence for clone ‘58218.1’.

[0098] SEQ ID NO:58 is the determined cDNA sequence for clone ‘69339.1’.

[0099] SEQ ID NO:59 is the determined cDNA sequence for clone ‘69340.1’.

[0100] SEQ ID NO:60 is the determined cDNA sequence for clone ‘69341.1’.

[0101] SEQ ID NO:61 is the determined cDNA sequence for clone ‘69342.1’.

[0102] SEQ ID NO:62 is the determined cDNA sequence for clone ‘69343.1’.

[0103] SEQ ID NO:63 is the determined cDNA sequence for clone ‘69344.1’.

[0104] SEQ ID NO:64 is the determined cDNA sequence for clone ‘69345.1’.

[0105] SEQ ID NO:65 is the determined cDNA sequence for clone ‘69346.1’.

[0106] SEQ ID NO:66 is the determined cDNA sequence for clone ‘69347.1’.

[0107] SEQ ID NO:67 is the determined cDNA sequence for clone ‘69348.1’.

[0108] SEQ ID NO:68 is the determined cDNA sequence for clone ‘69349.1’.

[0109] SEQ ID NO:69 is the determined cDNA sequence for clone ‘69350.1’.

[0110] SEQ ID NO:70 is the determined cDNA sequence for clone ‘69351.1’.

[0111] SEQ ID NO:71 is the determined cDNA sequence for clone ‘69352.1’.

[0112] SEQ ID NO:72 is the determined cDNA sequence for clone ‘69353.1’.

[0113] SEQ ID NO:73 is the determined cDNA sequence for clone ‘69354.1’.

[0114] SEQ ID NO:74 is the determined cDNA sequence for clone ‘69355.1’.

[0115] SEQ ID NO:75 is the determined cDNA sequence for clone ‘69357.1’.

[0116] SEQ ID NO:76 is the determined cDNA sequence for clone ‘69358.1’.

[0117] SEQ ID NO:77 is the determined cDNA sequence for clone ‘69360.1’.

[0118] SEQ ID NO:78 is the determined cDNA sequence for clone ‘69965.1’.

[0119] SEQ ID NO:79 is the determined cDNA sequence for clone ‘69966.1’.

[0120] SEQ ID NO:80 is the determined cDNA sequence for clone ‘69967.1’.

[0121] SEQ ID NO:81 is the determined cDNA sequence for clone ‘69969.1’.

[0122] SEQ ID NO:82 is the determined cDNA sequence for clone ‘69970.1’.

[0123] SEQ ID NO:83 is the determined cDNA sequence for clone ‘69971.1’.

[0124] SEQ ID NO:84 is the determined cDNA sequence for clone ‘69972.1’.

[0125] SEQ ID NO:85 is the determined cDNA sequence for clone ‘69974.1’.

[0126] SEQ ID NO:86 is the determined cDNA sequence for clone ‘69975.1’.

[0127] SEQ ID NO:87 is the determined cDNA sequence for clone ‘69976.1’.

[0128] SEQ ID NO:88 is the determined cDNA sequence for clone ‘69977.1’.

[0129] SEQ ID NO:89 is the determined cDNA sequence for clone ‘69978.1’.

[0130] SEQ ID NO:90 is the determined cDNA sequence for clone ‘69980.1’.

[0131] SEQ ID NO:91 is the determined cDNA sequence for clone ‘69981.1’.

[0132] SEQ ID NO:92 is the determined cDNA sequence for clone ‘69982.1’.

[0133] SEQ ID NO:93 is the determined cDNA sequence for clone ‘69983.1’.

[0134] SEQ ID NO:94 is the determined cDNA sequence for clone ‘69984.1’.

[0135] SEQ ID NO:95 is the determined cDNA sequence for clone ‘69985.1’.

[0136] SEQ ID NO:96 is the determined cDNA sequence for clone ‘69986.1’.

[0137] SEQ ID NO:97 is the determined cDNA sequence for clone ‘69987.1’.

[0138] SEQ ID NO:98 is the determined cDNA sequence for clone ‘69989.1’.

[0139] SEQ ID NO:99 is the determined cDNA sequence for clone ‘69990.1’.

[0140] SEQ ID NO:100 is the determined cDNA sequence for clone ‘69991.1’.

[0141] SEQ ID NO:101 is the determined cDNA sequence for clone ‘69992.1’.

[0142] SEQ ID NO:102 is the determined cDNA sequence for clone ‘69993.1’.

[0143] SEQ ID NO:103 is the determined cDNA sequence for clone ‘69994.1’.

[0144] SEQ ID NO:104 is the determined cDNA sequence for clone ‘69995.1’.

[0145] SEQ ID NO:105 is the determined cDNA sequence for clone ‘69996.1’.

[0146] SEQ ID NO:106 is the determined cDNA sequence for clone ‘69997.1’.

[0147] SEQ ID NO:107 is the determined cDNA sequence for clone ‘69999.1’.

[0148] SEQ ID NO:108 is the determined cDNA sequence for clone ‘70000.1’.

[0149] SEQ ID NO:109 is the determined cDNA sequence for clone ‘70001.1’.

[0150] SEQ ID NO:110 is the determined cDNA sequence for clone ‘70002.1’.

[0151] SEQ ID NO:111 is the determined cDNA sequence for clone ‘70003.1’.

[0152] SEQ ID NO:112 is the determined cDNA sequence for clone ‘70004.1’.

[0153] SEQ ID NO:113 is the determined cDNA sequence for clone ‘70006.1’.

[0154] SEQ ID NO:114 is the determined cDNA sequence for clone ‘70007.1’.

[0155] SEQ ID NO:115 is the determined cDNA sequence for clone ‘70009.1’.

[0156] SEQ ID NO:116 is the determined cDNA sequence for clone ‘70010.1’.

[0157] SEQ ID NO:117 is the determined cDNA sequence for clone ‘70011.1’.

[0158] SEQ ID NO:118 is the determined cDNA sequence for clone ‘70012.1’.

[0159] SEQ ID NO:119 is the determined cDNA sequence for clone ‘70013.1’.

[0160] SEQ ID NO:120 is the determined cDNA sequence for clone ‘70015.1’.

[0161] SEQ ID NO:121 is the determined cDNA sequence for clone ‘70016.1’.

[0162] SEQ ID NO:122 is the determined cDNA sequence for clone ‘70017.1’.

[0163] SEQ ID NO:123 is the determined cDNA sequence for clone ‘70018.1’.

[0164] SEQ ID NO:124 is the determined cDNA sequence for clone ‘70020.1’.

[0165] SEQ ID NO:125 is the determined cDNA sequence for clone ‘70021.1’.

[0166] SEQ ID NO:126 is the determined cDNA sequence for clone ‘70022.1’.

[0167] SEQ ID NO:127 is the determined cDNA sequence for clone ‘70024.1’.

[0168] SEQ ID NO:128 is the determined cDNA sequence for clone ‘70025.1’.

[0169] SEQ ID NO:129 is the determined cDNA sequence for clone ‘70026.1’.

[0170] SEQ ID NO:130 is the determined cDNA sequence for clone ‘70028.1’.

[0171] SEQ ID NO:131 is the determined cDNA sequence for clone ‘70029.1’.

[0172] SEQ ID NO:132 is the determined cDNA sequence for clone ‘70030.1’.

[0173] SEQ ID NO:133 is the determined cDNA sequence for clone ‘70032.1’.

[0174] SEQ ID NO:134 is the determined cDNA sequence for clone ‘70033.1’.

[0175] SEQ ID NO:135 is the determined cDNA sequence for clone ‘70034.1’.

[0176] SEQ ID NO:136 is the determined cDNA sequence for clone ‘70036.1’.

[0177] SEQ ID NO: 137 is the determined cDNA sequence for clone ‘70037.1’.

[0178] SEQ ID NO:138 is the determined cDNA sequence for clone ‘70038.1’.

[0179] SEQ ID NO:139 is the determined cDNA sequence for clone ‘70040.1’.

[0180] SEQ ID NO:140 is the determined cDNA sequence for clone ‘70041.1’.

[0181] SEQ ID NO:141 is the determined cDNA sequence for clone ‘70044.1’.

[0182] SEQ ID NO:142 is the determined cDNA sequence for clone ‘70045.1’.

[0183] SEQ ID NO:143 is the determined cDNA sequence for clone ‘69489.1’.

[0184] SEQ ID NO:144 is the determined cDNA sequence for clone ‘69490.1’.

[0185] SEQ ID NO:145 is the determined cDNA sequence for clone ‘69491.1’.

[0186] SEQ ID NO:146 is the determined cDNA sequence for clone ‘69492.1’.

[0187] SEQ ID NO:147 is the determined cDNA sequence for clone ‘69493.1’.

[0188] SEQ ID NO:148 is the determined cDNA sequence for clone ‘69494.1’.

[0189] SEQ ID NO:149 is the determined cDNA sequence for clone ‘69496.1’.

[0190] SEQ ID NO:150 is the determined cDNA sequence for clone ‘69497.1’.

[0191] SEQ ID NO:151 is the determined cDNA sequence for clone ‘69498.1’.

[0192] SEQ ID NO:152 is the determined cDNA sequence for clone ‘69499.1’.

[0193] SEQ ID NO:153 is the determined cDNA sequence for clone ‘69500.1’.

[0194] SEQ ID NO:154 is the determined cDNA sequence for clone ‘69501.1’.

[0195] SEQ ID NO:155 is the determined cDNA sequence for clone ‘69503.1’.

[0196] SEQ ID NO:156 is the determined cDNA sequence for clone ‘69505.1’.

[0197] SEQ ID NO:157 is the determined cDNA sequence for clone ‘69506.1’.

[0198] SEQ ID NO:158 is the determined cDNA sequence for clone ‘69507.1’.

[0199] SEQ ID NO:159 is the determined cDNA sequence for clone ‘69508.1’.

[0200] SEQ ID NO:160 is the determined cDNA sequence for clone ‘69509.1’.

[0201] SEQ ID NO:161 is the determined cDNA sequence for clone ‘69511.1’.

[0202] SEQ ID NO:162 is the determined cDNA sequence for clone ‘69512.1’.

[0203] SEQ ID NO:163 is the determined cDNA sequence for clone ‘69513.1’.

[0204] SEQ ID NO:164 is the determined cDNA sequence for clone ‘69514.1’.

[0205] SEQ ID NO:165 is the determined cDNA sequence for clone ‘69516.1’.

[0206] SEQ ID NO:166 is the determined cDNA sequence for clone ‘69517.1’.

[0207] SEQ ID NO:167 is the determined cDNA sequence for clone ‘69518.1’.

[0208] SEQ ID NO:168 is the determined cDNA sequence for clone ‘69520.1’.

[0209] SEQ ID NO:169 is the determined cDNA sequence for clone ‘69521.1’.

[0210] SEQ ID NO:170 is the determined cDNA sequence for clone ‘69523.1’.

[0211] SEQ ID NO:171 is the determined cDNA sequence for clone ‘69524.1’.

[0212] SEQ ID NO:172 is the determined cDNA sequence for clone ‘69525.1’.

[0213] SEQ ID NO:173 is the determined cDNA sequence for clone ‘69526.1’.

[0214] SEQ ID NO:174 is the determined cDNA sequence for clone ‘69527.1’.

[0215] SEQ ID NO:175 is the determined cDNA sequence for clone ‘69528.1’.

[0216] SEQ ID NO:176 is the determined cDNA sequence for clone ‘69529.1’.

[0217] SEQ ID NO:177 is the determined cDNA sequence for clone ‘69530.1’.

[0218] SEQ ID NO:178 is the determined cDNA sequence for clone ‘70019.1’.

[0219] SEQ ID NO:179 is the determined cDNA sequence for clone ‘70023.1’.

[0220] SEQ ID NO: 180 is the determined cDNA sequence for clone ‘70035.1’.

[0221] SEQ ID NO:181 is the determined cDNA sequence for clone ‘70039.1’.

[0222] SEQ ID NO:182 is the determined cDNA sequence for clone ‘70046.1’.

[0223] SEQ ID NO:183 is the determined cDNA sequence for clone ‘70047.1’.

[0224] SEQ ID NO:184 is the determined cDNA sequence for clone ‘70048.1’.

[0225] SEQ ID NO:185 is the determined cDNA sequence for clone ‘70049.1’.

[0226] SEQ ID NO:186 is the determined cDNA sequence for clone ‘70050.1’.

[0227] SEQ ID NO:187 is the determined cDNA sequence for clone ‘70051.1’.

[0228] SEQ ID NO:188 is the determined cDNA sequence for clone ‘70052.1’.

[0229] SEQ ID NO:189 is the determined cDNA sequence for clone ‘70053.1’.

[0230] SEQ ID NO:190 is the determined cDNA sequence for clone ‘70054.1’.

[0231] SEQ ID NO:191 is the determined cDNA sequence for clone ‘70055.1’.

[0232] SEQ ID NO:192 is the determined cDNA sequence for clone ‘70058.1’.

[0233] SEQ ID NO:193 is the determined cDNA sequence for clone ‘70059.1’.

[0234] SEQ ID NO:194 is the determined cDNA sequence for clone ‘70060.1’.

[0235] SEQ ID NO:195 is the determined cDNA sequence for clone ‘70061.1’.

[0236] SEQ ID NO:196 is the determined cDNA sequence for clone ‘70064.1’.

[0237] SEQ ID NO:197 is the determined cDNA sequence for clone ‘70065.1’.

[0238] SEQ ID NO:198 is the determined cDNA sequence for clone ‘70066.1’.

[0239] SEQ ID NO:199 is the determined cDNA sequence for clone ‘70067.1’.

[0240] SEQ ID NO:200 is the determined cDNA sequence for clone ‘70068.1’.

[0241] SEQ ID NO:201 is the determined cDNA sequence for clone ‘70069.1’.

[0242] SEQ ID NO:202 is the determined cDNA sequence for clone ‘70070.1’.

[0243] SEQ ID NO:203 is the determined cDNA sequence for clone ‘70071.1’.

[0244] SEQ ID NO:204 is the determined cDNA sequence for clone ‘70072.1’.

[0245] SEQ ID NO:205 is the determined cDNA sequence for clone ‘70073.1’.

[0246] SEQ ID NO:206 is the determined cDNA sequence for clone ‘70074.1’.

[0247] SEQ ID NO:207 is the determined cDNA sequence for clone ‘70075.1’.

[0248] SEQ ID NO:208 is the determined cDNA sequence for clone ‘70077.1’.

[0249] SEQ ID NO:209 is the determined cDNA sequence for clone ‘70078.1’.

[0250] SEQ ID NO:210 is the determined cDNA sequence for clone ‘70079.1’.

[0251] SEQ ID NO:211 is the determined cDNA sequence for clone ‘70144.1’.

[0252] SEQ ID NO:212 is the determined cDNA sequence for clone ‘70145.1’.

[0253] SEQ ID NO:213 is the determined cDNA sequence for clone ‘70146.1’.

[0254] SEQ ID NO:214 is the determined cDNA sequence for clone ‘70147.1’.

[0255] SEQ ID NO:215 is the determined cDNA sequence for clone ‘70148.1’.

[0256] SEQ ID NO:216 is the determined cDNA sequence for clone ‘70149.1’.

[0257] SEQ ID NO:217 is the determined cDNA sequence for clone ‘70150.1’.

[0258] SEQ ID NO:218 is the determined cDNA sequence for clone ‘70151.1’.

[0259] SEQ ID NO:219 is the determined cDNA sequence for clone ‘70152.1’.

[0260] SEQ ID NO:220 is the determined cDNA sequence for clone ‘70153.1’.

[0261] SEQ ID NO:221 is the determined cDNA sequence for clone ‘70154.’.

[0262] SEQ ID NO:222 is the determined cDNA sequence for clone ‘70155.1’.

[0263] SEQ ID NO:223 is the determined cDNA sequence for clone ‘70158.1’.

[0264] SEQ ID NO:224 is the determined cDNA sequence for clone ‘70159.1’.

[0265] SEQ ID NO:225 is the determined cDNA sequence for clone ‘70160.1’.

[0266] SEQ ID NO:226 is the determined cDNA sequence for clone ‘70161.1’.

[0267] SEQ ID NO:227 is the determined cDNA sequence for clone ‘70162.1’.

[0268] SEQ ID NO:228 is the determined cDNA sequence for clone ‘70163.1’.

[0269] SEQ ID NO:229 is the determined cDNA sequence for clone ‘70165.1’.

[0270] SEQ ID NO:230 is the determined cDNA sequence for clone 63690041 R0663:A02.

[0271] SEQ ID NO:231 is the determined cDNA sequence for clone 63690042 R0663:A03.

[0272] SEQ ID NO:232 is the determined cDNA sequence for clone 63690043 R0663:A05.

[0273] SEQ ID NO:233 is the determined cDNA sequence for clone 63690045 R0663:A07.

[0274] SEQ ID NO:234 is the determined cDNA sequence for clone 63690046 R0663:A08.

[0275] SEQ ID NO:235 is the determined cDNA sequence for clone 63690047 R0663:A09.

[0276] SEQ ID NO:236 is the determined cDNA sequence for clone 63690048 R0663:A10.

[0277] SEQ ID NO:237 is the determined cDNA sequence for clone 63690049 R0663:A11.

[0278] SEQ ID NO:238 is the determined cDNA sequence for clone 63690050 R0663:A12.

[0279] SEQ ID NO:239 is the determined cDNA sequence for clone 63690051 R0663:B01.

[0280] SEQ ID NO:240 is the determined cDNA sequence for clone 63690052 R0663:B02.

[0281] SEQ ID NO:241 is the determined cDNA sequence for clone 63690053 R0663:B03.

[0282] SEQ ID NO:242 is the determined cDNA sequence for clone 63690054 R0663:B04.

[0283] SEQ ID NO:243 is the determined cDNA sequence for clone 63690055 R0663:B05.

[0284] SEQ ID NO:244 is the determined cDNA sequence for clone 63690056 R0663:B06.

[0285] SEQ ID NO:245 is the determined cDNA sequence for clone 63690057 R0663:B07.

[0286] SEQ ID NO:246 is the determined cDNA sequence for clone 63690058 R0663:B08.

[0287] SEQ ID NO:247 is the determined cDNA sequence for clone 63690059 R0663:B09.

[0288] SEQ ID NO:248 is the determined cDNA sequence for clone 63690061 R0663:B11.

[0289] SEQ ID NO:249 is the determined cDNA sequence for clone 63690062 R0663:B12.

[0290] SEQ ID NO:250 is the determined cDNA sequence for clone 63690063 R0663:C01.

[0291] SEQ ID NO:251 is the determined cDNA sequence for clone 63690065 R0663:C03.

[0292] SEQ ID NO:252 is the determined cDNA sequence for clone 63690066 R0663:C04.

[0293] SEQ ID NO:253 is the determined cDNA sequence for clone 63690067 R0663:C05.

[0294] SEQ ID NO:254 is the determined cDNA sequence for clone 63690068 R0663:C06.

[0295] SEQ ID NO:255 is the determined cDNA sequence for clone 63690069 R0663:C07.

[0296] SEQ ID NO:256 is the determined cDNA sequence for clone 63690070 R0663:C08.

[0297] SEQ ID NO:257 is the determined cDNA sequence for clone 63690071 R0663:C09.

[0298] SEQ ID NO:258 is the determined cDNA sequence for clone 63690072 R0663:C10.

[0299] SEQ ID NO:259 is the determined cDNA sequence for clone 63690073 R0663:C11.

[0300] SEQ ID NO:260 is the determined cDNA sequence for clone 63690074 R0663:C12.

[0301] SEQ ID NO:261 is the determined cDNA sequence for clone 63690075 R0663:D01.

[0302] SEQ ID NO:262 is the determined cDNA sequence for clone 63690077 R0663:D03.

[0303] SEQ ID NO:263 is the determined cDNA sequence for clone 63690078 R0663:D04.

[0304] SEQ ID NO:264 is the determined cDNA sequence for clone 63690079 R0663:D05.

[0305] SEQ ID NO:265 is the determined cDNA sequence for clone 63690080 R0663:D06.

[0306] SEQ ID NO:266 is the determined cDNA sequence for clone 63690081 R0663:D07.

[0307] SEQ ID NO:267 is the determined cDNA sequence for clone 63690082 R0663:D08.

[0308] SEQ ID NO:268 is the determined cDNA sequence for clone 63690083 R0663:D09.

[0309] SEQ ID NO:269 is the determined cDNA sequence for clone 63690084 R0663:D10.

[0310] SEQ ID NO:270 is the determined cDNA sequence for clone 63690085 R0663:D11

[0311] SEQ ID NO:271 is the determined cDNA sequence for clone 63690086 R0663:D12.

[0312] SEQ ID NO:272 is the determined cDNA sequence for clone 63690087 R0663:E01.

[0313] SEQ ID NO:273 is the determined cDNA sequence for clone 63690088 R0663:E02.

[0314] SEQ ID NO:274 is the determined cDNA sequence for clone 63690089 R0663:E03.

[0315] SEQ ID NO:275 is the determined cDNA sequence for clone 63690090 R0663:E04.

[0316] SEQ ID NO:276 is the determined cDNA sequence for clone 63690091 R0663:E05.

[0317] SEQ ID NO:277 is the determined cDNA sequence for clone 63690092 R0663:E06.

[0318] SEQ ID NO:278 is the determined cDNA sequence for clone 63690094 R0663:E08.

[0319] SEQ ID NO:279 is the determined cDNA sequence for clone 63690095 R0663:E09.

[0320] SEQ ID NO:280 is the determined cDNA sequence for clone 63690096 R0663:E10.

[0321] SEQ ID NO:281 is the determined cDNA sequence for clone 63690097 R0663:E11.

[0322] SEQ ID NO:282 is the determined cDNA sequence for clone 63690098 R0663:E12.

[0323] SEQ ID NO:283 is the determined cDNA sequence for clone 63690099 R0663:F01.

[0324] SEQ ID NO:284 is the determined cDNA sequence for clone 63690100 R0663:F02.

[0325] SEQ ID NO:285 is the determined cDNA sequence for clone 63690101 R0663:F03.

[0326] SEQ ID NO:286 is the determined cDNA sequence for clone 63690102 R0663:F04.

[0327] SEQ ID NO:287 is the determined cDNA sequence for clone 63690104 R0663:F06.

[0328] SEQ ID NO:288 is the determined cDNA sequence for clone 63690105 R0663:F07.

[0329] SEQ ID NO:289 is the determined cDNA sequence for clone 63690106 R0663:F08.

[0330] SEQ ID NO:290 is the determined cDNA sequence for clone 63690107 R0663:F09.

[0331] SEQ ID NO:291 is the determined cDNA sequence for clone 63690108 R0663:F10.

[0332] SEQ ID NO:292 is the determined cDNA sequence for clone 63690109 R0663:F11.

[0333] SEQ ID NO:293 is the determined cDNA sequence for clone 63690110 R0663:F12.

[0334] SEQ ID NO:294 is the determined cDNA sequence for clone 63690111 R0663:G01.

[0335] SEQ ID NO:295 is the determined cDNA sequence for clone 63690112 R0663:G02.

[0336] SEQ ID NO:296 is the determined cDNA sequence for clone 63690114 R0663:G04.

[0337] SEQ ID NO:297 is the determined cDNA sequence for clone 63690115 R0663:G05.

[0338] SEQ ID NO:298 is the determined cDNA sequence for clone 63690116 R0663:G06.

[0339] SEQ ID NO:299 is the determined cDNA sequence for clone 63690117 R0663:G07.

[0340] SEQ ID NO:300 is the determined cDNA sequence for clone 63690118 R0663:G08.

[0341] SEQ ID NO:301 is the determined cDNA sequence for clone 63690119 R0663:G09.

[0342] SEQ ID NO:302 is the determined cDNA sequence for clone 63690121 R0663:G11.

[0343] SEQ ID NO:303 is the determined cDNA sequence for clone 63690122 R0663:G12.

[0344] SEQ ID NO:304 is the determined cDNA sequence for clone 63690123 R0663:H01.

[0345] SEQ ID NO:305 is the determined cDNA sequence for clone 63690124 R0663:H02.

[0346] SEQ ID NO:306 is the determined cDNA sequence for clone 63690125 R0663:H03.

[0347] SEQ ID NO:307 is the determined cDNA sequence for clone 63690126 R0663:H04.

[0348] SEQ ID NO:308 is the determined cDNA sequence for clone 63690127 R0663:H05.

[0349] SEQ ID NO:309 is the determined cDNA sequence for clone 63690128 R0663:H06.

[0350] SEQ ID NO:310 is the determined cDNA sequence for clone 63690129 R0663:H07.

[0351] SEQ ID NO:311 is the determined cDNA sequence for clone 63690130 R0663:H08.

[0352] SEQ ID NO:312 is the determined cDNA sequence for clone 63690131 R0663:H09.

[0353] SEQ ID NO:313 is the determined cDNA sequence for clone 63690132 R0663:H10.

[0354] SEQ ID NO:314 is the determined cDNA sequence for clone 63690133 R0663:H11.

[0355] SEQ ID NO:315 is the determined cDNA sequence for clone 63689948 R0664:A02.

[0356] SEQ ID NO:316 is the determined cDNA sequence for clone 63689949 R0664:A03.

[0357] SEQ ID NO:317 is the determined cDNA sequence for clone 63689950 R0664:A05.

[0358] SEQ ID NO:318 is the determined cDNA sequence for clone 63689951 R0664:A06.

[0359] SEQ ID NO:319 is the determined cDNA sequence for clone 63689952 R0664:A07.

[0360] SEQ ID NO:320 is the determined cDNA sequence for clone 63689953 R0664:A08.

[0361] SEQ ID NO:321 is the determined cDNA sequence for clone 63689954 R0664:A09.

[0362] SEQ ID NO:322 is the determined cDNA sequence for clone 63689956 R0664:A11.

[0363] SEQ ID NO:323 is the determined cDNA sequence for clone 63689957 R0664:A12.

[0364] SEQ ID NO:324 is the determined cDNA sequence for clone 63689959 R0664:B02.

[0365] SEQ ID NO:325 is the determined cDNA sequence for clone 63689961 R0664:B04.

[0366] SEQ ID NO:326 is the determined cDNA sequence for clone 63689962 R0664:B05.

[0367] SEQ ID NO:327 is the determined cDNA sequence for clone 63689963 R0664:B06.

[0368] SEQ ID NO:328 is the determined cDNA sequence for clone 63689964 R0664:B07.

[0369] SEQ ID NO:329 is the determined cDNA sequence for clone 63689965 R0664:B08.

[0370] SEQ ID NO:330 is the determined cDNA sequence for clone 63689966 R0664:B09.

[0371] SEQ ID NO:331 is the determined cDNA sequence for clone 63689967 R0664:B10.

[0372] SEQ ID NO:332 is the determined cDNA sequence for clone 63689968 R0664:B11.

[0373] SEQ ID NO:333 is the determined cDNA sequence for clone 63689969 R0664:B12.

[0374] SEQ ID NO:334 is the determined cDNA sequence for clone 63689970 R0664:C01.

[0375] SEQ ID NO:335 is the determined cDNA sequence for clone 63689972 R0664:C03.

[0376] SEQ ID NO:336 is the determined cDNA sequence for clone 63689973 R0664:C04.

[0377] SEQ ID NO:337 is the determined cDNA sequence for clone 63689974 R0664:C05.

[0378] SEQ ID NO:338 is the determined cDNA sequence for clone 63689975 R0664:C06.

[0379] SEQ ID NO:339 is the determined cDNA sequence for clone 63689976 R0664:C07.

[0380] SEQ ID NO:340 is the determined cDNA sequence for clone 63689977 R0664:C08.

[0381] SEQ ID NO:341 is the determined cDNA sequence for clone 63689978 R0664:C09.

[0382] SEQ ID NO:342 is the determined cDNA sequence for clone 63689979 R0664:C10.

[0383] SEQ ID NO:343 is the determined cDNA sequence for clone 63689980 R0664:C11.

[0384] SEQ ID NO:344 is the determined cDNA sequence for clone 63689981 R0664:C12.

[0385] SEQ ID NO:345 is the determined cDNA sequence for clone 63689982 R0664:D01.

[0386] SEQ ID NO:346 is the determined cDNA sequence for clone 63689983 R0664:D02.

[0387] SEQ ID NO:347 is the determined cDNA sequence for clone 63689984 R0664:D03.

[0388] SEQ ID NO:348 is the determined cDNA sequence for clone 63689985 R0664:D04.

[0389] SEQ ID NO:349 is the determined cDNA sequence for clone 63689986 R0664:D05.

[0390] SEQ ID NO:350 is the determined cDNA sequence for clone 63689987 R0664:D06.

[0391] SEQ ID NO:351 is the determined cDNA sequence for clone 63689988 R0664:D07.

[0392] SEQ ID NO:352 is the determined cDNA sequence for clone 63689990 R0664:D09.

[0393] SEQ ID NO:353 is the determined cDNA sequence for clone 63689992 R0664:D11.

[0394] SEQ ID NO:354 is the determined cDNA sequence for clone 63689993 R0664:D12.

[0395] SEQ ID NO:355 is the determined cDNA sequence for clone 63689994 R0664:E01.

[0396] SEQ ID NO:356 is the determined cDNA sequence for clone 63689995 R0664:E02.

[0397] SEQ ID NO:357 is the determined cDNA sequence for clone 63689996 R0664:E03.

[0398] SEQ ID NO:358 is the determined cDNA sequence for clone 63689997 R0664:E04.

[0399] SEQ ID NO:359 is the determined cDNA sequence for clone 63689998 R0664:E05.

[0400] SEQ ID NO:360 is the determined cDNA sequence for clone 63689999 R0664:E06.

[0401] SEQ ID NO:361 is the determined cDNA sequence for clone 63690000 R0664:E07.

[0402] SEQ ID NO:362 is the determined cDNA sequence for clone 63690001 R0664:E08.

[0403] SEQ ID NO:363 is the determined cDNA sequence for clone 63690002 R0664:E09.

[0404] SEQ ID NO:364 is the determined cDNA sequence for clone 63690003 R0664:E10.

[0405] SEQ ID NO:365 is the determined cDNA sequence for clone 63690004 R0664:E 11.

[0406] SEQ ID NO:366 is the determined cDNA sequence for clone 63690006 R0664:F01.

[0407] SEQ ID NO:367 is the determined cDNA sequence for clone 63690007 R0664:F02.

[0408] SEQ ID NO:368 is the determined cDNA sequence for clone 63690008 R0664:F03.

[0409] SEQ ID NO:369 is the determined cDNA sequence for clone 63690009 R0664:F04.

[0410] SEQ ID NO:370 is the determined cDNA sequence for clone 63690010 R0664:F05.

[0411] SEQ ID NO:371 is the determined cDNA sequence for clone 63690011 R0664:F06.

[0412] SEQ ID NO:372 is the determined cDNA sequence for clone 63690012 R0664:F07.

[0413] SEQ ID NO:373 is the determined cDNA sequence for clone 63690013 R0664:F08.

[0414] SEQ ID NO:374 is the determined cDNA sequence for clone 63690014 R0664:F09.

[0415] SEQ ID NO:375 is the determined cDNA sequence for clone 63690015 R0664:F10.

[0416] SEQ ID NO:376 is the determined cDNA sequence for clone 63690016 R0664:F1.

[0417] SEQ ID NO:377 is the determined cDNA sequence for clone 63690017 R0664:F12.

[0418] SEQ ID NO:378 is the determined cDNA sequence for clone 63690030 R0664:H01.

[0419] SEQ ID NO:379 is the determined cDNA sequence for clone 63690031 R0664:H02.

[0420] SEQ ID NO:380 is the determined cDNA sequence for clone 63690032 R0664:H03.

[0421] SEQ ID NO:381 is the determined cDNA sequence for clone 63690033 R0664:H04.

[0422] SEQ ID NO:382 is the determined cDNA sequence for clone 63690034 R0664:H05.

[0423] SEQ ID NO:383 is the determined cDNA sequence for clone 63690035 R0664:H06.

[0424] SEQ ID NO:384 is the determined cDNA sequence for clone 63690037 R0664:H08.

[0425] SEQ ID NO:385 is the determined cDNA sequence for clone 63690038 R0664:H09.

[0426] SEQ ID NO:386 is the determined cDNA sequence for clone 63690040 R0664: H 11.

[0427] SEQ ID NO:387 is the determined cDNA sequence for clone 63689762 R0665:A02.

[0428] SEQ ID NO:388 is the determined cDNA sequence for clone 63689763 R0665:A03.

[0429] SEQ ID NO:389 is the determined cDNA sequence for clone 63689764 R0665:A05.

[0430] SEQ ID NO:390 is the determined cDNA sequence for clone 63689765 R0665:A06.

[0431] SEQ ID NO:391 is the determined cDNA sequence for clone 63689766 R0665:A07.

[0432] SEQ ID NO:392 is the determined cDNA sequence for clone 63689767 R0665:A08.

[0433] SEQ ID NO:393 is the determined cDNA sequence for clone 63689768 R0665:A09.

[0434] SEQ ID NO:394 is the determined cDNA sequence for clone 63689769 R0665:A10.

[0435] SEQ ID NO:395 is the determined cDNA sequence for clone 63689770 R0665:A11.

[0436] SEQ ID NO:396 is the determined cDNA sequence for clone 63689771 R0665:A12.

[0437] SEQ ID NO:397 is the determined cDNA sequence for clone 63689772 R0665:B01.

[0438] SEQ ID NO:398 is the determined cDNA sequence for clone 63689773 R0665:B02.

[0439] SEQ ID NO:399 is the determined cDNA sequence for clone 63689774 R0665:B03.

[0440] SEQ ID NO:400 is the determined cDNA sequence for clone 63689775 R0665:B04.

[0441] SEQ ID NO:401 is the determined cDNA sequence for clone 63689777 R0665:B06.

[0442] SEQ ID NO:402 is the determined cDNA sequence for clone 63689778 R0665:B07.

[0443] SEQ ID NO:403 is the determined cDNA sequence for clone 63689780 R0665:B09.

[0444] SEQ ID NO:404 is the determined cDNA sequence for clone 63689781 R0665:B10.

[0445] SEQ ID NO:405 is the determined cDNA sequence for clone 63689782 R0665:B11.

[0446] SEQ ID NO:406 is the determined cDNA sequence for clone 63689783 R0665:B12.

[0447] SEQ ID NO:407 is the determined cDNA sequence for clone 63689784 R0665:C01.

[0448] SEQ ID NO:408 is the determined cDNA sequence for clone 63689785 R0665:C02.

[0449] SEQ ID NO:409 is the determined cDNA sequence for clone 63689786 R0665:C03.

[0450] SEQ ID NO:410 is the determined cDNA sequence for clone 63689788 R0665:C05.

[0451] SEQ ID NO:411 is the determined cDNA sequence for clone 63689789 R0665:C06.

[0452] SEQ ID NO:412 is the determined cDNA sequence for clone 63689790 R0665:C07.

[0453] SEQ ID NO:413 is the determined cDNA sequence for clone 63689791 R0665:C08.

[0454] SEQ ID NO:414 is the determined cDNA sequence for clone 63689792 R0665:C09.

[0455] SEQ ID NO:415 is the determined cDNA sequence for clone 63689793 R0665:C10.

[0456] SEQ ID NO:416 is the determined cDNA sequence for clone 63689794 R0665:C11.

[0457] SEQ ID NO:417 is the determined cDNA sequence for clone 63689795 R0665:C12.

[0458] SEQ ID NO:418 is the determined cDNA sequence for clone 63689797 R0665:D02.

[0459] SEQ ID NO:419 is the determined cDNA sequence for clone 63689798 R0665:D03.

[0460] SEQ ID NO:420 is the determined cDNA sequence for clone 63689799 R0665:D04.

[0461] SEQ ID NO:421 is the determined cDNA sequence for clone 63689801 R0665:D06.

[0462] SEQ ID NO:422 is the determined cDNA sequence for clone 63689802 R0665:D07.

[0463] SEQ ID NO:423 is the determined cDNA sequence for clone 63689804 R0665:D09.

[0464] SEQ ID NO:424 is the determined cDNA sequence for clone 63689805 R0665:D10.

[0465] SEQ ID NO:425 is the determined cDNA sequence for clone 63689806 R0665:D11.

[0466] SEQ ID NO:426 is the determined cDNA sequence for clone 63689807 R0665:D12.

[0467] SEQ ID NO:427 is the determined cDNA sequence for clone 63689808 R0665:E01.

[0468] SEQ ID NO:428 is the determined cDNA sequence for clone 63689809 R0665:E02.

[0469] SEQ ID NO:429 is the determined cDNA sequence for clone 63689810 R0665:E03.

[0470] SEQ ID NO:430 is the determined cDNA sequence for clone 63689811 R0665:E04.

[0471] SEQ ID NO:431 is the determined cDNA sequence for clone 63689812 R0665:E05.

[0472] SEQ ID NO:432 is the determined cDNA sequence for clone 63689813 R0665:E06.

[0473] SEQ ID NO:433 is the determined cDNA sequence for clone 63689814 R0665:E07.

[0474] SEQ ID NO:434 is the determined cDNA sequence for clone 63689815 R0665:E08.

[0475] SEQ ID NO:435 is the determined cDNA sequence for clone 63689816 R0665:E09.

[0476] SEQ ID NO:436 is the determined cDNA sequence for clone 63689817 R0665:E10.

[0477] SEQ ID NO:437 is the determined cDNA sequence for clone 63689818 R0665:E 1.

[0478] SEQ ID NO:438 is the determined cDNA sequence for clone 63689819 R0665:E12.

[0479] SEQ ID NO:439 is the determined cDNA sequence for clone 63689820 R0665:F01.

[0480] SEQ ID NO:440 is the determined cDNA sequence for clone 63689821 R0665:F02.

[0481] SEQ ID NO:441 is the determined cDNA sequence for clone 63689824 R0665:F05.

[0482] SEQ ID NO:442 is the determined cDNA sequence for clone 63689825 R0665:F06.

[0483] SEQ ID NO:443 is the determined cDNA sequence for clone 63689826 R0665:F07.

[0484] SEQ ID NO:444 is the determined cDNA sequence for clone 63689827 R0665:F08.

[0485] SEQ ID NO:445 is the determined cDNA sequence for clone 63689828 R0665:F09.

[0486] SEQ ID NO:446 is the determined cDNA sequence for clone 63689829 R0665:F10.

[0487] SEQ ID NO:447 is the determined cDNA sequence for clone 63689830 R0665:F11.

[0488] SEQ ID NO:448 is the determined cDNA sequence for clone 63689832 R0665:G01.

[0489] SEQ ID NO:449 is the determined cDNA sequence for clone 63689833 R0665:G02.

[0490] SEQ ID NO:450 is the determined cDNA sequence for clone 63689834 R0665:G03.

[0491] SEQ ID NO:451 is the determined cDNA sequence for clone 63689837 R0665:G06.

[0492] SEQ ID NO:452 is the determined cDNA sequence for clone 63689838 R0665:G07.

[0493] SEQ ID NO:453 is the determined cDNA sequence for clone 63689839 R0665:G08.

[0494] SEQ ID NO:454 is the determined cDNA sequence for clone 63689840 R0665:G09.

[0495] SEQ ID NO:455 is the determined cDNA sequence for clone 63689842 R0665:G11.

[0496] SEQ ID NO:456 is the determined cDNA sequence for clone 63689843 R0665:G12.

[0497] SEQ ID NO:457 is the determined cDNA sequence for clone 63689845 R0665:H02.

[0498] SEQ ID NO:458 is the determined cDNA sequence for clone 63689846 R0665:H03.

[0499] SEQ ID NO:459 is the determined cDNA sequence for clone 63689847 R0665:H04.

[0500] SEQ ID NO:460 is the determined cDNA sequence for clone 63689848 R0665:H05.

[0501] SEQ ID NO:461 is the determined cDNA sequence for clone 63689849 R0665:H06.

[0502] SEQ ID NO:462 is the determined cDNA sequence for clone 63689850 R0665:H07.

[0503] SEQ ID NO:463 is the determined cDNA sequence for clone 63689851 R0665:H08.

[0504] SEQ ID NO:464 is the determined cDNA sequence for clone 63689852 R0665:H09.

[0505] SEQ ID NO:465 is the determined cDNA sequence for clone 63689853 R0665:H10.

[0506] SEQ ID NO:466 is the determined cDNA sequence for clone 63689854 R0665:H11.

[0507] SEQ ID NO:467 is the determined cDNA sequence for clone 63689577 R0666:A03.

[0508] SEQ ID NO:468 is the determined cDNA sequence for clone 63689578 R0666:A05.

[0509] SEQ ID NO:469 is the determined cDNA sequence for clone 63689579 R0666:A06.

[0510] SEQ ID NO:470 is the determined cDNA sequence for clone 63689580 R0666:A07.

[0511] SEQ ID NO:471 is the determined cDNA sequence for clone 63689581 R0666:A08.

[0512] SEQ ID NO:472 is the determined cDNA sequence for clone 63689582 R0666:A09.

[0513] SEQ ID NO:473 is the determined cDNA sequence for clone 63689583 R0666:A10.

[0514] SEQ ID NO:474 is the determined cDNA sequence for clone 63689584 R0666:A 11.

[0515] SEQ ID NO:475 is the determined cDNA sequence for clone 63689585 R0666:A12.

[0516] SEQ ID NO:476 is the determined cDNA sequence for clone 63689586 R0666:B01.

[0517] SEQ ID NO:477 is the determined cDNA sequence for clone 63689587 R0666:B02.

[0518] SEQ ID NO:478 is the determined cDNA sequence for clone 63689590 R0666:B05.

[0519] SEQ ID NO:479 is the determined cDNA sequence for clone 63689591 R0666:B06.

[0520] SEQ ID NO:480 is the determined cDNA sequence for clone 63689592 R0666:B07.

[0521] SEQ ID NO:481 is the determined cDNA sequence for clone 63689593 R0666:B08.

[0522] SEQ ID NO:482 is the determined cDNA sequence for clone 63689594 R0666:B09.

[0523] SEQ ID NO:483 is the determined cDNA sequence for clone 63689595 R0666:B10.

[0524] SEQ ID NO:484 is the determined cDNA sequence for clone 63689596 R0666:B11.

[0525] SEQ ID NO:485 is the determined cDNA sequence for clone 63689598 R0666:C01.

[0526] SEQ ID NO:486 is the determined cDNA sequence for clone 63689600 R0666:C03.

[0527] SEQ ID NO:487 is the determined cDNA sequence for clone 63689601 R0666:C04.

[0528] SEQ ID NO:488 is the determined cDNA sequence for clone 63689602 R0666:C05.

[0529] SEQ ID NO:489 is the determined cDNA sequence for clone 63689603 R0666:C06.

[0530] SEQ ID NO:490 is the determined cDNA sequence for clone 63689606 R0666:C09.

[0531] SEQ ID NO:491 is the determined cDNA sequence for clone 63689607 R0666:C10.

[0532] SEQ ID NO:492 is the determined cDNA sequence for clone 63689608 R0666:C11.

[0533] SEQ ID NO:493 is the determined cDNA sequence for clone 63689609 R0666:C12.

[0534] SEQ ID NO:494 is the determined cDNA sequence for clone 63689610 R0666:D01.

[0535] SEQ ID NO:495 is the determined cDNA sequence for clone 63689611 R0666:D02.

[0536] SEQ ID NO:496 is the determined cDNA sequence for clone 63689612 R0666:D03.

[0537] SEQ ID NO:497 is the determined cDNA sequence for clone 63689613 R0666:D04.

[0538] SEQ ID NO:498 is the determined cDNA sequence for clone 63689614 R0666:D05.

[0539] SEQ ID NO:499 is the determined cDNA sequence for clone 63689615 R0666:D06.

[0540] SEQ ID NO:500 is the determined cDNA sequence for clone 63689616 R0666:D07.

[0541] SEQ ID NO:501 is the determined cDNA sequence for clone 63689617 R0666:D08.

[0542] SEQ ID NO:502 is the determined cDNA sequence for clone 63689618 R0666:D09.

[0543] SEQ ID NO:503 is the determined cDNA sequence for clone 63689619 R0666:D10.

[0544] SEQ ID NO:504 is the determined cDNA sequence for clone 63689620 R0666:D10.

[0545] SEQ ID NO:505 is the determined cDNA sequence for clone 63689622 R0666:E01.

[0546] SEQ ID NO:506 is the determined cDNA sequence for clone 63689624 R0666:E03.

[0547] SEQ ID NO:507 is the determined cDNA sequence for clone 63689625 R0666:E04.

[0548] SEQ ID NO:508 is the determined cDNA sequence for clone 63689626 R0666:E05.

[0549] SEQ ID NO:509 is the determined cDNA sequence for clone 63689627 R0666: E06.

[0550] SEQ ID NO:510 is the determined cDNA sequence for clone 63689628 R0666:E07.

[0551] SEQ ID NO:511 is the determined cDNA sequence for clone 63689630 R0666:E09.

[0552] SEQ ID NO:512 is the determined cDNA sequence for clone 63689631 R0666:E10.

[0553] SEQ ID NO:513 is the determined cDNA sequence for clone 63689632 R0666:E11.

[0554] SEQ ID NO:514 is the determined cDNA sequence for clone 63689633 R0666:E12.

[0555] SEQ ID NO:515 is the determined cDNA sequence for clone 63689634 R0666:F01.

[0556] SEQ ID NO:516 is the determined cDNA sequence for clone 63689635 R0666:F02.

[0557] SEQ ID NO:517 is the determined cDNA sequence for clone 63689636 R0666:F03.

[0558] SEQ ID NO:518 is the determined cDNA sequence for clone 63689637 R0666:F04.

[0559] SEQ ID NO:519 is the determined cDNA sequence for clone 63689638 R0666:F05.

[0560] SEQ ID NO:520 is the determined cDNA sequence for clone 63689639 R0666:F06.

[0561] SEQ ID NO:521 is the determined cDNA sequence for clone 63689641 R0666:F08.

[0562] SEQ ID NO:522 is the determined cDNA sequence for clone 63689642 R0666:F09.

[0563] SEQ ID NO:523 is the determined cDNA sequence for clone 63689643 R0666:F10.

[0564] SEQ ID NO:524 is the determined cDNA sequence for clone 63689644 R0666:F11.

[0565] SEQ ID NO:525 is the determined cDNA sequence for clone 63689645 R0666:F12.

[0566] SEQ ID NO:526 is the determined cDNA sequence for clone 63689648 R0666:G03.

[0567] SEQ ID NO:527 is the determined cDNA sequence for clone 63689649 R0666:G04.

[0568] SEQ ID NO:528 is the determined cDNA sequence for clone 63689650 R0666:G05.

[0569] SEQ ID NO:529 is the determined cDNA sequence for clone 63689652 R0666:G07.

[0570] SEQ ID NO:530 is the determined cDNA sequence for clone 63689653 R0666:G08.

[0571] SEQ ID NO:531 is the determined cDNA sequence for clone 63689654 R0666:G09.

[0572] SEQ ID NO:532 is the determined cDNA sequence for clone 63689655 R0666:G10.

[0573] SEQ ID NO:533 is the determined cDNA sequence for clone 63689656 R0666:G 11.

[0574] SEQ ID NO:534 is the determined cDNA sequence for clone 63689658 R0666:H01.

[0575] SEQ ID NO:535 is the determined cDNA sequence for clone 63689659 R0666:H02.

[0576] SEQ ID NO:536 is the determined cDNA sequence for clone 63689660 R0666:H03.

[0577] SEQ ID NO:537 is the determined cDNA sequence for clone 63689661 R0666:H04.

[0578] SEQ ID NO:538 is the determined cDNA sequence for clone 63689662 R0666:H05.

[0579] SEQ ID NO:539 is the determined cDNA sequence for clone 63689663 R0666:H06.

[0580] SEQ ID NO:540 is the determined cDNA sequence for clone 63689664 R0666:H07.

[0581] SEQ ID NO:541 is the determined cDNA sequence for clone 63689665 R0666:H08.

[0582] SEQ ID NO:542 is the determined cDNA sequence for clone 63689666 R0666:H09.

[0583] SEQ ID NO:543 is the determined cDNA sequence for clone 63689667 R0666:H10.

[0584] SEQ ID NO:544 is the determined cDNA sequence for clone 63689668 R0666:H11.

[0585] SEQ ID NO:545 is the determined cDNA sequence for clone 63689484 R0667:A03.

[0586] SEQ ID NO:546 is the determined cDNA sequence for clone 63689485 R0667:A05.

[0587] SEQ ID NO:547 is the determined cDNA sequence for clone 63689486 R0667:A06.

[0588] SEQ ID NO:548 is the determined cDNA sequence for clone 63689487 R0667:A07.

[0589] SEQ ID NO:549 is the determined cDNA sequence for clone 63689488 R0667:A08.

[0590] SEQ ID NO:550 is the determined cDNA sequence for clone 63689489 R0667:A09.

[0591] SEQ ID NO:551 is the determined cDNA sequence for clone 63689491 R0667:A11.

[0592] SEQ ID NO:552 is the determined cDNA sequence for clone 63689492 R0667:A12.

[0593] SEQ ID NO:553 is the determined cDNA sequence for clone 63689493 R0667:B01.

[0594] SEQ ID NO:554 is the determined cDNA sequence for clone 63689494 R0667:B02.

[0595] SEQ ID NO:555 is the determined cDNA sequence for clone 63689495 R0667:B03.

[0596] SEQ ID NO:556 is the determined cDNA sequence for clone 63689496 R0667:B04.

[0597] SEQ ID NO:557 is the determined cDNA sequence for clone 63689497 R0667:B05.

[0598] SEQ ID NO:558 is the determined cDNA sequence for clone 63689498 R0667:B06.

[0599] SEQ ID NO:559 is the determined cDNA sequence for clone 63689499 R0667:B07.

[0600] SEQ ID NO:560 is the determined cDNA sequence for clone 63689500 R0667:B08.

[0601] SEQ ID NO:561 is the determined cDNA sequence for clone 63689501 R0667:B09.

[0602] SEQ ID NO:562 is the determined cDNA sequence for clone 63689502 R0667:B10.

[0603] SEQ ID NO:563 is the determined cDNA sequence for clone 63689503 R0667:B11.

[0604] SEQ ID NO:564 is the determined cDNA sequence for clone 63689504 R0667:B12.

[0605] SEQ ID NO:565 is the determined cDNA sequence for clone 63689505 R0667:C01.

[0606] SEQ ID NO:566 is the determined cDNA sequence for clone 63689506 R0667:C02.

[0607] SEQ ID NO:567 is the determined cDNA sequence for clone 63689507 R0667:C03.

[0608] SEQ ID NO:568 is the determined cDNA sequence for clone 63689508 R0667:C04.

[0609] SEQ ID NO:569 is the determined cDNA sequence for clone 63689509 R0667:C05.

[0610] SEQ ID NO:570 is the determined cDNA sequence for clone 63689511 R0667:C07.

[0611] SEQ ID NO:571 is the determined cDNA sequence for clone 63689512 R0667:C08.

[0612] SEQ ID NO:572 is the determined cDNA sequence for clone 63689514 R0667:C10.

[0613] SEQ ID NO:573 is the determined cDNA sequence for clone 63689515 R0667:C11.

[0614] SEQ ID NO:574 is the determined cDNA sequence for clone 63689516 R0667:C12.

[0615] SEQ ID NO:575 is the determined cDNA sequence for clone 63689517 R0667:D01.

[0616] SEQ ID NO:576 is the determined cDNA sequence for clone 63689518 R0667:D02.

[0617] SEQ ID NO:577 is the determined cDNA sequence for clone 63689519 R0667:D03.

[0618] SEQ ID NO:578 is the determined cDNA sequence for clone 63689520 R0667:D04.

[0619] SEQ ID NO:579 is the determined cDNA sequence for clone 63689521 R0667:D05.

[0620] SEQ ID NO:580 is the determined cDNA sequence for clone 63689522 R0667:D06.

[0621] SEQ ID NO:581 is the determined cDNA sequence for clone 63689523 R0667:D07.

[0622] SEQ ID NO:582 is the determined cDNA sequence for clone 63689524 R0667:D08.

[0623] SEQ ID NO:583 is the determined cDNA sequence for clone 63689526 R0667:D10.

[0624] SEQ ID NO:584 is the determined cDNA sequence for clone 63689527 R0667:D 11.

[0625] SEQ ID NO:585 is the determined cDNA sequence for clone 63689528 R0667:D12.

[0626] SEQ ID NO:586 is the determined cDNA sequence for clone 63689529 R0667:E01.

[0627] SEQ ID NO:587 is the determined cDNA sequence for clone 63689532 R0667:E04.

[0628] SEQ ID NO:588 is the determined cDNA sequence for clone 63689533 R0667:E05.

[0629] SEQ ID NO:589 is the determined cDNA sequence for clone 63689534 R0667:E06.

[0630] SEQ ID NO:590 is the determined cDNA sequence for clone 63689535 R0667:E07.

[0631] SEQ ID NO:591 is the determined cDNA sequence for clone 63689536 R0667:E08.

[0632] SEQ ID NO:592 is the determined cDNA sequence for clone 63689537 R0667:E09.

[0633] SEQ ID NO:593 is the determined cDNA sequence for clone 63689538 R0667:E10.

[0634] SEQ ID NO:594 is the determined cDNA sequence for clone 63689539 R0667:E11.

[0635] SEQ ID NO:595 is the determined cDNA sequence for clone 63689540 R0667:E12.

[0636] SEQ ID NO:596 is the determined cDNA sequence for clone 63689541 R0667:F01.

[0637] SEQ ID NO:597 is the determined cDNA sequence for clone 63689542 R0667:F02.

[0638] SEQ ID NO:598 is the determined cDNA sequence for clone 63689544 R0667:F04.

[0639] SEQ ID NO:599 is the determined cDNA sequence for clone 63689546 R0667:F06.

[0640] SEQ ID NO:600 is the determined cDNA sequence for clone 63689547 R0667:F07.

[0641] SEQ ID NO:601 is the determined cDNA sequence for clone 63689548 R0667:F08.

[0642] SEQ ID NO:602 is the determined cDNA sequence for clone 63689549 R0667:F09.

[0643] SEQ ID NO:603 is the determined cDNA sequence for clone 63689550 R0667:F10.

[0644] SEQ ID NO:604 is the determined cDNA sequence for clone 63689551 R0667:F11.

[0645] SEQ ID NO:605 is the determined cDNA sequence for clone 63689552 R0667:F12.

[0646] SEQ ID NO:606 is the determined cDNA sequence for clone 63689553 R0667:G01.

[0647] SEQ ID NO:607 is the determined cDNA sequence for clone 63689554 R0667:G02.

[0648] SEQ ID NO:608 is the determined cDNA sequence for clone 63689555 R0667:G03.

[0649] SEQ ID NO:609 is the determined cDNA sequence for clone 63689557 R0667:G05.

[0650] SEQ ID NO:610 is the determined cDNA sequence for clone 63689558 R0667:G06.

[0651] SEQ ID NO:611 is the determined cDNA sequence for clone 63689559 R0667:G07.

[0652] SEQ ID NO:612 is the determined cDNA sequence for clone 63689560 R0667:G08.

[0653] SEQ ID NO:613 is the determined cDNA sequence for clone 63689561 R0667:G09.

[0654] SEQ ID NO:614 is the determined cDNA sequence for clone 63689562 R0667:G10.

[0655] SEQ ID NO:615 is the determined cDNA sequence for clone 63689563 R0667:G11.

[0656] SEQ ID NO:616 is the determined cDNA sequence for clone 63689564 R0667:G12.

[0657] SEQ ID NO:617 is the determined cDNA sequence for clone 63689565 R0667:H01.

[0658] SEQ ID NO:618 is the determined cDNA sequence for clone 63689566 R0667:H02.

[0659] SEQ ID NO:619 is the determined cDNA sequence for clone 63689569 R0667:H05.

[0660] SEQ ID NO:620 is the determined cDNA sequence for clone 63689570 R0667:H06.

[0661] SEQ ID NO:621 is the determined cDNA sequence for clone 63689571 R0667:H07.

[0662] SEQ ID NO:622 is the determined cDNA sequence for clone 63689572 R0667:H08.

[0663] SEQ ID NO:623 is the determined cDNA sequence for clone 63689573 R0667:H09.

[0664] SEQ ID NO:624 is the determined cDNA sequence for clone 63689574 R0667:H10.

[0665] SEQ ID NO:625 is the determined cDNA sequence for clone 63689575 R0667: H 11.

[0666] SEQ ID NO:626 is the determined cDNA sequence for clone 63689390 R0668:A02.

[0667] SEQ ID NO:627 is the determined cDNA sequence for clone 63689391 R0668:A03.

[0668] SEQ ID NO:628 is the determined cDNA sequence for clone 63689392 R0668:A05.

[0669] SEQ ID NO:629 is the determined cDNA sequence for clone 63689393 R0668:A06.

[0670] SEQ ID NO:630 is the determined cDNA sequence for clone 63689394 R0668:A07.

[0671] SEQ ID NO:631 is the determined cDNA sequence for clone 63689395 R0668:A08.

[0672] SEQ ID NO:632 is the determined cDNA sequence for clone 63689396 R0668:A09.

[0673] SEQ ID NO:633 is the determined cDNA sequence for clone 63689397 R0668:A10.

[0674] SEQ ID NO:634 is the determined cDNA sequence for clone 63689398 R0668:A11.

[0675] SEQ ID NO:635 is the determined cDNA sequence for clone 63689399 R0668:A12.

[0676] SEQ ID NO:636 is the determined cDNA sequence for clone 63689401 R0668:B02.

[0677] SEQ ID NO:637 is the determined cDNA sequence for clone 63689402 R0668:B03.

[0678] SEQ ID NO:638 is the determined cDNA sequence for clone 63689403 R0668:B04.

[0679] SEQ ID NO:639 is the determined cDNA sequence for clone 63689404 R0668:B05.

[0680] SEQ ID NO:640 is the determined cDNA sequence for clone 63689405 R0668:B06.

[0681] SEQ ID NO:641 is the determined cDNA sequence for clone 63689406 R0668:B07.

[0682] SEQ ID NO:642 is the determined cDNA sequence for clone 63689407 R0668:B08.

[0683] SEQ ID NO:643 is the determined cDNA sequence for clone 63689408 R0668:B09.

[0684] SEQ ID NO:644 is the determined cDNA sequence for clone 63689409 R0668:B10.

[0685] SEQ ID NO:645 is the determined cDNA sequence for clone 63689410 R0668:B11.

[0686] SEQ ID NO:646 is the determined cDNA sequence for clone 63689411 R0668:B12.

[0687] SEQ ID NO:647 is the determined cDNA sequence for clone 63689412 R0668:C01.

[0688] SEQ ID NO:648 is the determined cDNA sequence for clone 63689413 R0668:C02.

[0689] SEQ ID NO:649 is the determined cDNA sequence for clone 63689414 R0668:C03.

[0690] SEQ ID NO:650 is the determined cDNA sequence for clone 63689415 R0668:C04.

[0691] SEQ ID NO:651 is the determined cDNA sequence for clone 63689416 R0668:C05.

[0692] SEQ ID NO:652 is the determined cDNA sequence for clone 63689417 R0668:C06.

[0693] SEQ ID NO:653 is the determined cDNA sequence for clone 63689418 R0668:C07.

[0694] SEQ ID NO:654 is the determined cDNA sequence for clone 63689419 R0668:C08.

[0695] SEQ ID NO:655 is the determined cDNA sequence for clone 63689420 R0668:C09.

[0696] SEQ ID NO:656 is the determined cDNA sequence for clone 63689421 R0668:C10.

[0697] SEQ ID NO:657 is the determined cDNA sequence for clone 63689422 R0668:C1.

[0698] SEQ ID NO:658 is the determined cDNA sequence for clone 63689423 R0668:C12.

[0699] SEQ ID NO:659 is the determined cDNA sequence for clone 63689424 R0668:D01.

[0700] SEQ ID NO:660 is the determined cDNA sequence for clone 63689425 R0668:D02.

[0701] SEQ ID NO:661 is the determined cDNA sequence for clone 63689426 R0668:D03.

[0702] SEQ ID NO:662 is the determined cDNA sequence for clone 63689427 R0668:D04.

[0703] SEQ ID NO:663 is the determined cDNA sequence for clone 63689428 R0668:D05.

[0704] SEQ ID NO:664 is the determined cDNA sequence for clone 63689429 R0668:D06.

[0705] SEQ ID NO:665 is the determined cDNA sequence for clone 63689430 R0668:D07.

[0706] SEQ ID NO:666 is the determined cDNA sequence for clone 63689431 R0668:D08.

[0707] SEQ ID NO:667 is the determined cDNA sequence for clone 63689432 R0668:D09.

[0708] SEQ ID NO:668 is the determined cDNA sequence for clone 63689433 R0668:D10.

[0709] SEQ ID NO:669 is the determined cDNA sequence for clone 63689434 R0668:D11.

[0710] SEQ ID NO:670 is the determined cDNA sequence for clone 63689435 R0668:D12.

[0711] SEQ ID NO:671 is the determined cDNA sequence for clone 63689436 R0668:E01.

[0712] SEQ ID NO:672 is the determined cDNA sequence for clone 63689437 R0668:E02.

[0713] SEQ ID NO:673 is the determined cDNA sequence for clone 63689438 R0668:E03.

[0714] SEQ ID NO:674 is the determined cDNA sequence for clone 63689439 R0668:E04.

[0715] SEQ ID NO:675 is the determined cDNA sequence for clone 63689440 R0668:E05.

[0716] SEQ ID NO:676 is the determined cDNA sequence for clone 63689441 R0668:E06.

[0717] SEQ ID NO:677 is the determined cDNA sequence for clone 63689442 R0668:E07.

[0718] SEQ ID NO:678 is the determined cDNA sequence for clone 63689443 R0668:E08.

[0719] SEQ ID NO:679 is the determined cDNA sequence for clone 63689444 R0668:E09.

[0720] SEQ ID NO:680 is the determined cDNA sequence for clone 63689446 R0668:E11.

[0721] SEQ ID NO:681 is the determined cDNA sequence for clone 63689447 R0668:E12.

[0722] SEQ ID NO:682 is the determined cDNA sequence for clone 63689450 R0668:F03.

[0723] SEQ ID NO:683 is the determined cDNA sequence for clone 63689451 R0668:F04.

[0724] SEQ ID NO:684 is the determined cDNA sequence for clone 63689452 R0668:F05.

[0725] SEQ ID NO:685 is the determined cDNA sequence for clone 63689453 R0668:F06.

[0726] SEQ ID NO:686 is the determined cDNA sequence for clone 63689454 R0668:F07.

[0727] SEQ ID NO:687 is the determined cDNA sequence for clone 63689455 R0668:F08.

[0728] SEQ ID NO:688 is the determined cDNA sequence for clone 63689456 R0668:F09.

[0729] SEQ ID NO:689 is the determined cDNA sequence for clone 63689457 R0668:F10.

[0730] SEQ ID NO:690 is the determined cDNA sequence for clone 63689458 R0668:F11.

[0731] SEQ ID NO:691 is the determined cDNA sequence for clone 63689459 R0668:F12.

[0732] SEQ ID NO:692 is the determined cDNA sequence for clone 63689460 R0668:G01.

[0733] SEQ ID NO:693 is the determined cDNA sequence for clone 63689461 R0668:G02.

[0734] SEQ ID NO:694 is the determined cDNA sequence for clone 63689462 R0668:G03.

[0735] SEQ ID NO:695 is the determined cDNA sequence for clone 63689463 R0668:G04.

[0736] SEQ ID NO:696 is the determined cDNA sequence for clone 63689464 R0668:G05.

[0737] SEQ ID NO:697 is the determined cDNA sequence for clone 63689465 R0668:G06.

[0738] SEQ ID NO:698 is the determined cDNA sequence for clone 63689466 R0668:G07.

[0739] SEQ ID NO:699 is the determined cDNA sequence for clone 63689467 R0668:G08.

[0740] SEQ ID NO:700 is the determined cDNA sequence for clone 63689468 R0668:G09.

[0741] SEQ ID NO:701 is the determined cDNA sequence for clone 63689469 R0668:G10.

[0742] SEQ ID NO:702 is the determined cDNA sequence for clone 63689470 R0668:G11.

[0743] SEQ ID NO:703 is the determined cDNA sequence for clone 63689471 R0668:G12.

[0744] SEQ ID NO:704 is the determined cDNA sequence for clone 63689474 R0668:H03.

[0745] SEQ ID NO:705 is the determined cDNA sequence for clone 63689476 R0668:H05.

[0746] SEQ ID NO:706 is the determined cDNA sequence for clone 63689477 R0668:H06.

[0747] SEQ ID NO:707 is the determined cDNA sequence for clone 63689478 R0668:H07.

[0748] SEQ ID NO:708 is the determined cDNA sequence for clone 63689479 R0668:H08.

[0749] SEQ ID NO:709 is the determined cDNA sequence for clone 63689480 R0668:H09.

[0750] SEQ ID NO:710 is the determined cDNA sequence for clone 63689481 R0668:H10.

[0751] SEQ ID NO:711 is the determined cDNA sequence for clone 63689482 R0668:H 11.

[0752] SEQ ID NO:712 is the determined cDNA sequence for clone 63690135 R0669:A03.

[0753] SEQ ID NO:713 is the determined cDNA sequence for clone 63690137 R0669:A06.

[0754] SEQ ID NO:714 is the determined cDNA sequence for clone 63690139 R0669:A08.

[0755] SEQ ID NO:715 is the determined cDNA sequence for clone 63690140 R0669:A09.

[0756] SEQ ID NO:716 is the determined cDNA sequence for clone 63690141 R0669:A10.

[0757] SEQ ID NO:717 is the determined cDNA sequence for clone 63690142 R0669:A11.

[0758] SEQ ID NO:718 is the determined cDNA sequence for clone 63690143 R0669:A12.

[0759] SEQ ID NO:719 is the determined cDNA sequence for clone 63690146 R0669:B03.

[0760] SEQ ID NO:720 is the determined cDNA sequence for clone 63690147 R0669:B04.

[0761] SEQ ID NO:721 is the determined cDNA sequence for clone 63690148 R0669:B05.

[0762] SEQ ID NO:722 is the determined cDNA sequence for clone 63690149 R0669:B06.

[0763] SEQ ID NO:723 is the determined cDNA sequence for clone 63690150 R0669:B07.

[0764] SEQ ID NO:724 is the determined cDNA sequence for clone 63690151 R0669:B08.

[0765] SEQ ID NO:725 is the determined cDNA sequence for clone 63690152 R0669:B09.

[0766] SEQ ID NO:726 is the determined cDNA sequence for clone 63690153 R0669:BIO.

[0767] SEQ ID NO:727 is the determined cDNA sequence for clone 63690154 R0669:B11.

[0768] SEQ ID NO:728 is the determined cDNA sequence for clone 63690155 R0669:B12.

[0769] SEQ ID NO:729 is the determined cDNA sequence for clone 63690156 R0669:C01.

[0770] SEQ ID NO:730 is the determined cDNA sequence for clone 63690157 R0669:C02.

[0771] SEQ ID NO:731 is the determined cDNA sequence for clone 63690158 R0669:C03.

[0772] SEQ ID NO:732 is the determined cDNA sequence for clone 63690159 R0669:C04.

[0773] SEQ ID NO:733 is the determined cDNA sequence for clone 63690160 R0669:C05.

[0774] SEQ ID NO:734 is the determined cDNA sequence for clone 63690161 R0669:C06.

[0775] SEQ ID NO:735 is the determined cDNA sequence for clone 63690162 R0669:C07.

[0776] SEQ ID NO:736 is the determined cDNA sequence for clone 63690163 R0669:C08.

[0777] SEQ ID NO:737 is the determined cDNA sequence for clone 63690164 R0669:C09.

[0778] SEQ ID NO:738 is the determined cDNA sequence for clone 63690165 R0669:CIO.

[0779] SEQ ID NO:739 is the determined cDNA sequence for clone 63690166 R0669:C11.

[0780] SEQ ID NO:740 is the determined cDNA sequence for clone 63690167 R0669:C12.

[0781] SEQ ID NO:741 is the determined cDNA sequence for clone 63690168 R0669:D01.

[0782] SEQ ID NO:742 is the determined cDNA sequence for clone 63690169 R0669:D02.

[0783] SEQ ID NO:743 is the determined cDNA sequence for clone 63690170 R0669:D03.

[0784] SEQ ID NO:744 is the determined cDNA sequence for clone 63690171 R0669:D04.

[0785] SEQ ID NO:745 is the determined cDNA sequence for clone 63690172 R0669:D05.

[0786] SEQ ID NO:746 is the determined cDNA sequence for clone 63690173 R0669:D06.

[0787] SEQ ID NO:747 is the determined cDNA sequence for clone 63690174 R0669:D07.

[0788] SEQ ID NO:748 is the determined cDNA sequence for clone 63690175 R0669:D08.

[0789] SEQ ID NO:749 is the determined cDNA sequence for clone 63690176 R0669:D09.

[0790] SEQ ID NO:750 is the determined cDNA sequence for clone 63690177 R0669:D10.

[0791] SEQ ID NO:751 is the determined cDNA sequence for clone 63690178 R0669:D11.

[0792] SEQ ID NO:752 is the determined cDNA sequence for clone 63690179 R0669:D12.

[0793] SEQ ID NO:753 is the determined cDNA sequence for clone 63690180 R0669:E01.

[0794] SEQ ID NO:754 is the determined cDNA sequence for clone 63690181 R0669:E02.

[0795] SEQ ID NO:755 is the determined cDNA sequence for clone 63690182 R0669:E03.

[0796] SEQ ID NO:756 is the determined cDNA sequence for clone 63690183 R0669:E04.

[0797] SEQ ID NO:757 is the determined cDNA sequence for clone 63690184 R0669:E05.

[0798] SEQ ID NO:758 is the determined cDNA sequence for clone 63690185 R0669:E06.

[0799] SEQ ID NO:759 is the determined cDNA sequence for clone 63690186 R0669:E07.

[0800] SEQ ID NO:760 is the determined cDNA sequence for clone 63690187 R0669:E08.

[0801] SEQ ID NO:761 is the determined cDNA sequence for clone 63690188 R0669:E09.

[0802] SEQ ID NO:762 is the determined cDNA sequence for clone 63690189 R0669:E10.

[0803] SEQ ID NO:763 is the determined cDNA sequence for clone 63690190 R0669:E11.

[0804] SEQ ID NO:764 is the determined cDNA sequence for clone 63690191 R0669:E12.

[0805] SEQ ID NO:765 is the determined cDNA sequence for clone 63690192 R0669:F01.

[0806] SEQ ID NO:766 is the determined cDNA sequence for clone 63690193 R0669:F02.

[0807] SEQ ID NO:767 is the determined cDNA sequence for clone 63690194 R0669:F03.

[0808] SEQ ID NO:768 is the determined cDNA sequence for clone 63690195 R0669:F04.

[0809] SEQ ID NO:769 is the determined cDNA sequence for clone 63690196 R0669:F05. SEQ ID NO:770 is the determined cDNA sequence for clone 63690197 R0669:F06.

[0810] SEQ ID NO:771 is the determined cDNA sequence for clone 63690198 R0669:F07.

[0811] SEQ ID NO:772 is the determined cDNA sequence for clone 63690199 R0669:F08.

[0812] SEQ ID NO:773 is the determined cDNA sequence for clone 63690200 R0669:F09.

[0813] SEQ ID NO:774 is the determined cDNA sequence for clone 63690201 R0669:F10.

[0814] SEQ ID NO:775 is the determined cDNA sequence for clone 63690202 R0669:F11.

[0815] SEQ ID NO:776 is the determined cDNA sequence for clone 63690203 R0669:F12.

[0816] SEQ ID NO:777 is the determined cDNA sequence for clone 63690204 R0669:G05.

[0817] SEQ ID NO:778 is the determined cDNA sequence for clone 63690205 R0669:G02.

[0818] SEQ ID NO:779 is the determined cDNA sequence for clone 63690206 R0669:G03. 25 SEQ ID NO:780 is the determined cDNA sequence for clone 63690208 R0669:G05.

[0819] SEQ ID NO:781 is the determined cDNA sequence for clone 63690210 R0669:G07.

[0820] SEQ ID NO:782 is the determined cDNA sequence for clone 63690211 R0669:G08.

[0821] SEQ ID NO:783 is the determined cDNA sequence for clone 63690212 R0669:G09.

[0822] SEQ ID NO:784 is the determined cDNA sequence for clone 63690213 R0669:G10.

[0823] SEQ ID NO:785 is the determined cDNA sequence for clone 63690214 R0669:G11.

[0824] SEQ ID NO:786 is the determined cDNA sequence for clone 63690215 R0669:G12.

[0825] SEQ ID NO:787 is the determined cDNA sequence for clone 63690216 R0669:H01.

[0826] SEQ ID NO:788 is the determined cDNA sequence for clone 63690217 R0669:H02.

[0827] SEQ ID NO:789 is the determined cDNA sequence for clone 63690218 R0669:H03.

[0828] SEQ ID NO:790 is the determined cDNA sequence for clone 63690219 R0669:H04.

[0829] SEQ ID NO:791 is the determined cDNA sequence for clone 63690220 R0669:H05.

[0830] SEQ ID NO:792 is the determined cDNA sequence for clone 63690222 R0669:H07.

[0831] SEQ ID NO:793 is the determined cDNA sequence for clone 63690223 R0669:H08.

[0832] SEQ ID NO:794 is the determined cDNA sequence for clone 63690224 R0669:H09.

[0833] SEQ ID NO:795 is the determined cDNA sequence for clone 63690225 R0669:H10.

[0834] SEQ ID NO:796 is the determined cDNA sequence for clone 63690226 R0669:H11.

[0835] SEQ ID NO:797 is the determined cDNA sequence for clone 63695095 R0670:A02.

[0836] SEQ ID NO:798 is the determined cDNA sequence for clone 63695097 R0670:A05.

[0837] SEQ ID NO:799 is the determined cDNA sequence for clone 63695098 R0670:A06.

[0838] SEQ ID NO:800 is the determined cDNA sequence for clone 63695099 R0670:A07.

[0839] SEQ ID NO:801 is the determined cDNA sequence for clone 63695100 R0670:A08.

[0840] SEQ ID NO:802 is the determined cDNA sequence for clone 63695101 R0670:A09.

[0841] SEQ ID NO:803 is the determined cDNA sequence for clone 63695102 R0670:A10.

[0842] SEQ ID NO:804 is the determined cDNA sequence for clone 63695103 R0670:A11.

[0843] SEQ ID NO:805 is the determined cDNA sequence for clone 63695105 R0670:B01.

[0844] SEQ ID NO:806 is the determined cDNA sequence for clone 63695107 R0670:B03.

[0845] SEQ ID NO:807 is the determined cDNA sequence for clone 63695108 R0670:B04.

[0846] SEQ ID NO:808 is the determined cDNA sequence for clone 63695109 R0670:B05.

[0847] SEQ ID NO:809 is the determined cDNA sequence for clone 63695110 R0670:B06.

[0848] SEQ ID NO:810 is the determined cDNA sequence for clone 63695111 R0670:B07.

[0849] SEQ ID NO:811 is the determined cDNA sequence for clone 63695112 R0670:B08.

[0850] SEQ ID NO:812 is the determined cDNA sequence for clone 63695113 R0670:B09.

[0851] SEQ ID NO:813 is the determined cDNA sequence for clone 63695115 R0670:B11.

[0852] SEQ ID NO:814 is the determined cDNA sequence for clone 63695116 R0670:B12.

[0853] SEQ ID NO:815 is the determined cDNA sequence for clone 63695117 R0670:C01.

[0854] SEQ ID NO:816 is the determined cDNA sequence for clone 63695118 R0670:C02

[0855] SEQ ID NO:817 is the determined cDNA sequence for clone 63695119 R0670:C03.

[0856] SEQ ID NO:818 is the determined cDNA sequence for clone 63695120 R0670:C04.

[0857] SEQ ID NO:819 is the determined cDNA sequence for clone 63695121 R0670:C05.

[0858] SEQ ID NO:820 is the determined cDNA sequence for clone 63695122 R0670:C06.

[0859] SEQ ID NO:821 is the determined cDNA sequence for clone 63695123 R0670:C07.

[0860] SEQ ID NO:822 is the determined cDNA sequence for clone 63695124 R0670:C08.

[0861] SEQ ID NO:823 is the determined cDNA sequence for clone 63695125 R0670:C09.

[0862] SEQ ID NO:824 is the determined cDNA sequence for clone 63695126 R0670:C10.

[0863] SEQ ID NO:825 is the determined cDNA sequence for clone 63695127 R0670:C11.

[0864] SEQ ID NO:826 is the determined cDNA sequence for clone 63695128 R0670:C12.

[0865] SEQ ID NO:827 is the determined cDNA sequence for clone 63695129 R0670:D01.

[0866] SEQ ID NO:828 is the determined cDNA sequence for clone 63695130 R0670:D02.

[0867] SEQ ID NO:829 is the determined cDNA sequence for clone 63695131 R0670:D03.

[0868] SEQ ID NO:830 is the determined cDNA sequence for clone 63695132 R0670:D04.

[0869] SEQ ID NO:831 is the determined cDNA sequence for clone 63695133 R0670:D05.

[0870] SEQ ID NO:832 is the determined cDNA sequence for clone 63695134 R0670:D06.

[0871] SEQ ID NO:833 is the determined cDNA sequence for clone 63695135 R0670:D07.

[0872] SEQ ID NO:834 is the determined cDNA sequence for clone 63695136 R0670:D08.

[0873] SEQ ID NO:835 is the determined cDNA sequence for clone 63695137 R0670:D09.

[0874] SEQ ID NO:836 is the determined cDNA sequence for clone 63695138 R0670: D10.

[0875] SEQ ID NO:837 is the determined cDNA sequence for clone 63695139 R0670:D11.

[0876] SEQ ID NO:838 is the determined cDNA sequence for clone 63695140 R0670:D12.

[0877] SEQ ID NO:839 is the determined cDNA sequence for clone 63695142 R0670:E02.

[0878] SEQ ID NO:840 is the determined cDNA sequence for clone 63695143 R0670:E03.

[0879] SEQ ID NO:841 is the determined cDNA sequence for clone 63695144 R0670:E04.

[0880] SEQ ID NO:842 is the determined cDNA sequence for clone 63695145 R0670:E05.

[0881] SEQ ID NO:843 is the determined cDNA sequence for clone 63695147 R0670:E07.

[0882] SEQ ID NO:844 is the determined cDNA sequence for clone 63695148 R0670:E08.

[0883] SEQ ID NO:845 is the determined cDNA sequence for clone 63695149 R0670:E09.

[0884] SEQ ID NO:846 is the determined cDNA sequence for clone 63695150 R0670:E10.

[0885] SEQ ID NO:847 is the determined cDNA sequence for clone 63695151 R0670:E11.

[0886] SEQ ID NO:848 is the determined cDNA sequence for clone 63695152 R0670:E12.

[0887] SEQ ID NO:849 is the determined cDNA sequence for clone 63695153 R0670:F01.

[0888] SEQ ID NO:850 is the determined cDNA sequence for clone 63695154 R0670:F02.

[0889] SEQ ID NO:851 is the determined cDNA sequence for clone 63695155 R0670:F03.

[0890] SEQ ID NO:852 is the determined cDNA sequence for clone 63695156 R0670:F04.

[0891] SEQ ID NO:853 is the determined cDNA sequence for clone 63695157 R0670:F05.

[0892] SEQ ID NO:854 is the determined cDNA sequence for clone 63695158 R0670:F06.

[0893] SEQ ID NO:855 is the determined cDNA sequence for clone 63695159 R0670:F07.

[0894] SEQ ID NO:856 is the determined cDNA sequence for clone 63695160 R0670:F08.

[0895] SEQ ID NO:857 is the determined cDNA sequence for clone 63695161 R0670:F09.

[0896] SEQ ID NO:858 is the determined cDNA sequence for clone 63695162 R0670:F10.

[0897] SEQ ID NO:859 is the determined cDNA sequence for clone 63695163 R0670:F11.

[0898] SEQ ID NO:860 is the determined cDNA sequence for clone 63695164 R0670:F12.

[0899] SEQ ID NO:861 is the determined cDNA sequence for clone 63695165 R0670:G01.

[0900] SEQ ID NO:862 is the determined cDNA sequence for clone 63695166 R0670:G02.

[0901] SEQ ID NO:863 is the determined cDNA sequence for clone 63695167 R0670:G03.

[0902] SEQ ID NO:864 is the determined cDNA sequence for clone 63695168 R0670:G04.

[0903] SEQ ID NO:865 is the determined cDNA sequence for clone 63695169 R0670:G05.

[0904] SEQ ID NO:866 is the determined cDNA sequence for clone 63695170 R0670:G06.

[0905] SEQ ID NO:867 is the determined cDNA sequence for clone 63695171 R0670:G07.

[0906] SEQ ID NO:868 is the determined cDNA sequence for clone 63695172 R0670:G08.

[0907] SEQ ID NO:869 is the determined cDNA sequence for clone 63695173 R0670:G09.

[0908] SEQ ID NO:870 is the determined cDNA sequence for clone 63695174 R0670:G10.

[0909] SEQ ID NO:871 is the determined cDNA sequence for clone 63695175 R0670:G11.

[0910] SEQ ID NO:872 is the determined cDNA sequence for clone 63695176 R0670:G12.

[0911] SEQ ID NO:873 is the determined cDNA sequence for clone 63695177 R0670:H01.

[0912] SEQ ID NO:874 is the determined cDNA sequence for clone 63695178 R0670:H02.

[0913] SEQ ID NO:875 is the determined cDNA sequence for clone 63695179 R0670:H03.

[0914] SEQ ID NO:876 is the determined cDNA sequence for clone 63695180 R0670:H04.

[0915] SEQ ID NO:877 is the determined cDNA sequence for clone 63695181 R0670:H05.

[0916] SEQ ID NO:878 is the determined cDNA sequence for clone 63695182 R0670:H06.

[0917] SEQ ID NO:879 is the determined cDNA sequence for clone 63695183 R0670:H07.

[0918] SEQ ID NO:880 is the determined cDNA sequence for clone 63695184 R0670:H08.

[0919] SEQ ID NO:881 is the determined cDNA sequence for clone 63695185 R0670:H09.

[0920] SEQ ID NO:882 is the determined cDNA sequence for clone 63695186 R0670:H10.

[0921] SEQ ID NO:883 is the determined cDNA sequence for clone 63695187 R0670:H11.

[0922] SEQ ID NO:884 is the determined cDNA sequence for clone 63695653 R0671:A02.

[0923] SEQ ID NO:885 is the determined cDNA sequence for clone 63695654 R0671:A03.

[0924] SEQ ID NO:886 is the determined cDNA sequence for clone 63695655 R0671:A05.

[0925] SEQ ID NO:887 is the determined cDNA sequence for clone 63695657 R0671:A07.

[0926] SEQ ID NO:888 is the determined cDNA sequence for clone 63695659 R0671:A09.

[0927] SEQ ID NO:889 is the determined cDNA sequence for clone 63695660 R0671:A10.

[0928] SEQ ID NO:890 is the determined cDNA sequence for clone 63695661 R0671:A11.

[0929] SEQ ID NO:891 is the determined cDNA sequence for clone 63695663 R0671:B01.

[0930] SEQ ID NO:892 is the determined cDNA sequence for clone 63695664 R0671:B02.

[0931] SEQ ID NO:893 is the determined cDNA sequence for clone 63695665 R0671:B03.

[0932] SEQ ID NO:894 is the determined cDNA sequence for clone 63695666 R0671:B04.

[0933] SEQ ID NO:895 is the determined cDNA sequence for clone 63695667 R0671:B05.

[0934] SEQ ID NO:896 is the determined cDNA sequence for clone 63695668 R0671:B06.

[0935] SEQ ID NO:897 is the determined cDNA sequence for clone 63695669 R0671:B07.

[0936] SEQ ID NO:898 is the determined cDNA sequence for clone 63695670 R0671:B08.

[0937] SEQ ID NO:899 is the determined cDNA sequence for clone 63695671 R0671:B09.

[0938] SEQ ID NO:900 is the determined cDNA sequence for clone 63695672 R0671:B10.

[0939] SEQ ID NO:901 is the determined cDNA sequence for clone 63695673 R0671:B11.

[0940] SEQ ID NO:902 is the determined cDNA sequence for clone 63695675 R0671 C01.

[0941] SEQ ID NO:903 is the determined cDNA sequence for clone 63695676 R0671:C02.

[0942] SEQ ID NO:904 is the determined cDNA sequence for clone 63695678 R0671:C04.

[0943] SEQ ID NO:905 is the determined cDNA sequence for clone 63695679 R0671:C05.

[0944] SEQ ID NO:906 is the determined cDNA sequence for clone 63695680 R0671:C06.

[0945] SEQ ID NO:907 is the determined cDNA sequence for clone 63695682 R0671:C08.

[0946] SEQ ID NO:908 is the determined cDNA sequence for clone 63695683 R0671:C09.

[0947] SEQ ID NO:909 is the determined cDNA sequence for clone 63695685 R0671:C11.

[0948] SEQ ID NO:910 is the determined cDNA sequence for clone 63695686 R0671:C12.

[0949] SEQ ID NO:911 is the determined cDNA sequence for clone 63695687 R0671: D01.

[0950] SEQ ID NO:912 is the determined cDNA sequence for clone 63695688 R0671:D02.

[0951] SEQ ID NO:913 is the determined cDNA sequence for clone 63695689 R0671:D03.

[0952] SEQ ID NO:914 is the determined cDNA sequence for clone 63695690 R0671:D04.

[0953] SEQ ID NO:915 is the determined cDNA sequence for clone 63695691 R0671:D05.

[0954] SEQ ID NO:916 is the determined cDNA sequence for clone 63695692 R0671:D06.

[0955] SEQ ID NO:917 is the determined cDNA sequence for clone 63695693 R0671:D07.

[0956] SEQ ID NO:918 is the determined cDNA sequence for clone 63695694 R0671:D08.

[0957] SEQ ID NO:919 is the determined cDNA sequence for clone 63695695 R0671:D09.

[0958] SEQ ID NO:920 is the determined cDNA sequence for clone 63695696 R0671 D10.

[0959] SEQ ID NO:921 is the determined cDNA sequence for clone 63695697 R0671:D11.

[0960] SEQ ID NO:922 is the determined cDNA sequence for clone 63695698 R0671:D12.

[0961] SEQ ID NO:923 is the determined cDNA sequence for clone 63695699 R0671:E01.

[0962] SEQ ID NO:924 is the determined cDNA sequence for clone 63695700 R0671:E02.

[0963] SEQ ID NO:925 is the determined cDNA sequence for clone 63695701 R0671:E03.

[0964] SEQ ID NO:926 is the determined cDNA sequence for clone 63695702 R0671:E04.

[0965] SEQ ID NO:927 is the determined cDNA sequence for clone 63695703 R0671:E05.

[0966] SEQ ID NO:928 is the determined cDNA sequence for clone 63695704 R0671:E06.

[0967] SEQ ID NO:929 is the determined cDNA sequence for clone 63695705 R0671:E07.

[0968] SEQ ID NO:930 is the determined cDNA sequence for clone 63695706 R0671:E08.

[0969] SEQ ID NO:931 is the determined cDNA sequence for clone 63695708 R0671:E10.

[0970] SEQ ID NO:932 is the determined cDNA sequence for clone 63695710 R0671:E12.

[0971] SEQ ID NO:933 is the determined cDNA sequence for clone 63695711 R0671:F01.

[0972] SEQ ID NO:934 is the determined cDNA sequence for clone 63695712 R0671:F02.

[0973] SEQ ID NO:935 is the determined cDNA sequence for clone 63695713 R0671:F03.

[0974] SEQ ID NO:936 is the determined cDNA sequence for clone 63695715 R0671:F05.

[0975] SEQ ID NO:937 is the determined cDNA sequence for clone 63695716 R0671:F06.

[0976] SEQ ID NO:938 is the determined cDNA sequence for clone 63695717 R0671:F07.

[0977] SEQ ID NO:939 is the determined cDNA sequence for clone 63695718 R0671:F08.

[0978] SEQ ID NO:940 is the determined cDNA sequence for clone 63695719 R0671:F09.

[0979] SEQ ID NO:941 is the determined cDNA sequence for clone 63695720 R0671: F 10.

[0980] SEQ ID NO:942 is the determined cDNA sequence for clone 63695721 R0671:F11.

[0981] SEQ ID NO:943 is the determined cDNA sequence for clone 63695722 R0671:F12.

[0982] SEQ ID NO:944 is the determined cDNA sequence for clone 63695723 R0671:G01.

[0983] SEQ ID NO:945 is the determined cDNA sequence for clone 63695724 R0671:G02.

[0984] SEQ ID NO:946 is the determined cDNA sequence for clone 63695725 R0671:G03.

[0985] SEQ ID NO:947 is the determined cDNA sequence for clone 63695727 R0671:G05.

[0986] SEQ ID NO:948 is the determined cDNA sequence for clone 63695728 R0671:G06.

[0987] SEQ ID NO:949 is the determined cDNA sequence for clone 63695729 R0671:G07.

[0988] SEQ ID NO:950 is the determined cDNA sequence for clone 63695730 R0671:G08.

[0989] SEQ ID NO:951 is the determined cDNA sequence for clone 63695733 R0671:G11.

[0990] SEQ ID NO:952 is the determined cDNA sequence for clone 63695734 R0671:G12.

[0991] SEQ ID NO:953 is the determined cDNA sequence for clone 63695735 R0671:H01.

[0992] SEQ ID NO:954 is the determined cDNA sequence for clone 63695736 R0671:H02.

[0993] SEQ ID NO:955 is the determined cDNA sequence for clone 63695737 R0671:H03.

[0994] SEQ ID NO:956 is the determined cDNA sequence for clone 63695738 R0671:H04.

[0995] SEQ ID NO:957 is the determined cDNA sequence for clone 63695739 R0671:H05.

[0996] SEQ ID NO:958 is the determined cDNA sequence for clone 63695740 R0671:H06.

[0997] SEQ ID NO:959 is the determined cDNA sequence for clone 63695741 R0671:H07.

[0998] SEQ ID NO:960 is the determined cDNA sequence for clone 63695742 R0671:H08.

[0999] SEQ ID NO:961 is the determined cDNA sequence for clone 63695743 R0671:H09.

[1000] SEQ ID NO:962 is the determined cDNA sequence for clone 63695744 R0671: H 10.

[1001] SEQ ID NO:963 is the determined cDNA sequence for clone 63695745 R0671H11.

[1002] SEQ ID NO:964 is the determined cDNA sequence for clone 63695002 R0672:A02.

[1003] SEQ ID NO:965 is the determined cDNA sequence for clone 63695003 R0672:A03.

[1004] SEQ ID NO:966 is the determined cDNA sequence for clone 63695004 R0672:A05.

[1005] SEQ ID NO:967 is the determined cDNA sequence for clone 63695005 R0672:A06.

[1006] SEQ ID NO:968 is the determined cDNA sequence for clone 63695007 R0672:A08.

[1007] SEQ ID NO:969 is the determined cDNA sequence for clone 63695008 R0672:A09.

[1008] SEQ ID NO:970 is the determined cDNA sequence for clone 63695009 R0672:A10.

[1009] SEQ ID NO:971 is the determined cDNA sequence for clone 63695010 R0672:A11.

[1010] SEQ ID NO:972 is the determined cDNA sequence for clone 63695011 R0672:A12.

[1011] SEQ ID NO:973 is the determined cDNA sequence for clone 63695012 R0672:B01.

[1012] SEQ ID NO:974 is the determined cDNA sequence for clone 63695013 R0672:B02.

[1013] SEQ ID NO:975 is the determined cDNA sequence for clone 63695015 R0672:B04.

[1014] SEQ ID NO:976 is the determined cDNA sequence for clone 63695016 R0672:B05.

[1015] SEQ ID NO:977 is the determined cDNA sequence for clone 63695017 R0672:B06.

[1016] SEQ ID NO:978 is the determined cDNA sequence for clone 63695018 R0672:B07.

[1017] SEQ ID NO:979 is the determined cDNA sequence for clone 63695019 R0672:B08.

[1018] SEQ ID NO:980 is the determined cDNA sequence for clone 63695020 R0672:B09.

[1019] SEQ ID NO:981 is the determined cDNA sequence for clone 63695021 R0672:B10.

[1020] SEQ ID NO:982 is the determined cDNA sequence for clone 63695022 R0672:B11.

[1021] SEQ ID NO:983 is the determined cDNA sequence for clone 63695023 R0672:B12.

[1022] SEQ ID NO:984 is the determined cDNA sequence for clone 63695024 R0672:C01.

[1023] SEQ ID NO:985 is the determined cDNA sequence for clone 63695025 R0672:C02.

[1024] SEQ ID NO:986 is the determined cDNA sequence for clone 63695026 R0672:C03.

[1025] SEQ ID NO:987 is the determined cDNA sequence for clone 63695027 R0672:C04.

[1026] SEQ ID NO:988 is the determined cDNA sequence for clone 63695028 R0672:C05.

[1027] SEQ ID NO:989 is the determined cDNA sequence for clone 63695029 R0672:C06.

[1028] SEQ ID NO:990 is the determined cDNA sequence for clone 63695030 R0672:C07.

[1029] SEQ ID NO:991 is the determined cDNA sequence for clone 63695031 R0672:C08.

[1030] SEQ ID NO:992 is the determined cDNA sequence for clone 63695032 R0672:C09.

[1031] SEQ ID NO:993 is the determined cDNA sequence for clone 63695033 R0672:C10.

[1032] SEQ ID NO:994 is the determined cDNA sequence for clone 63695034 R0672:C 11.

[1033] SEQ ID NO:995 is the determined cDNA sequence for clone 63695035 R0672:C12.

[1034] SEQ ID NO:996 is the determined cDNA sequence for clone 63695036 R0672:D01.

[1035] SEQ ID NO:997 is the determined cDNA sequence for clone 63695037 R0672:D02.

[1036] SEQ ID NO:998 is the determined cDNA sequence for clone 63695038 R0672:D03.

[1037] SEQ ID NO:999 is the determined cDNA sequence for clone 63695039 R0672:D04.

[1038] SEQ ID NO: 1000 is the determined cDNA sequence for clone 63695040 R0672:D05.

[1039] SEQ ID NO:1001 is the determined cDNA sequence for clone 63695043 R0672:D08.

[1040] SEQ ID NO:1002 is the determined cDNA sequence for clone 63695044 R0672:D09.

[1041] SEQ ID NO:1003 is the determined cDNA sequence for clone 63695045 R0672:D10.

[1042] SEQ ID NO:1004 is the determined cDNA sequence for clone 63695046 R0672:D11.

[1043] SEQ ID NO:1005 is the determined cDNA sequence for clone 63695047 R0672:D12.

[1044] SEQ ID NO:1006 is the determined cDNA sequence for clone 63695048 R0672:E01.

[1045] SEQ ID NO:1007 is the determined cDNA sequence for clone 63695049 R0672:E02.

[1046] SEQ ID NO:1008 is the determined cDNA sequence for clone 63695050 R0672:E03.

[1047] SEQ ID NO:1009 is the determined cDNA sequence for clone 63695051 R0672:E04.

[1048] SEQ ID NO:1010 is the determined cDNA sequence for clone 63695052 R0672:E05.

[1049] SEQ ID NO:1011 is the determined cDNA sequence for clone 63695053 R0672:E06.

[1050] SEQ ID NO:1012 is the determined cDNA sequence for clone 63695054 R0672:E07.

[1051] SEQ ID NO:1013 is the determined cDNA sequence for clone 63695055 R0672:E08.

[1052] SEQ ID NO:1014 is the determined cDNA sequence for clone 63695056 R0672:E09.

[1053] SEQ ID NO:1015 is the determined cDNA sequence for clone 63695057 R0672:E10.

[1054] SEQ ID NO:1016 is the determined cDNA sequence for clone 63695058 R0672:E11.

[1055] SEQ ID NO:1017 is the determined cDNA sequence for clone 63695059 R0672:E12.

[1056] SEQ ID NO:1018 is the determined cDNA sequence for clone 63695060 R0672:F01.

[1057] SEQ ID NO:1019 is the determined cDNA sequence for clone 63695061 R0672:F02.

[1058] SEQ ID NO:1020 is the determined cDNA sequence for clone 63695062 R0672:F03.

[1059] SEQ ID NO:1021 is the determined cDNA sequence for clone 63695063 R0672:F04.

[1060] SEQ ID NO:1022 is the determined cDNA sequence for clone 63695064 R0672:F05.

[1061] SEQ ID NO:1023 is the determined cDNA sequence for clone 63695065 R0672:F06.

[1062] SEQ ID NO:1024 is the determined cDNA sequence for clone 63695066 R0672:F07.

[1063] SEQ ID NO:1025 is the determined cDNA sequence for clone 63695068 R0672:F09.

[1064] SEQ ID NO:1026 is the determined cDNA sequence for clone 63695069 R0672:F10.

[1065] SEQ ID NO:1027 is the determined cDNA sequence for clone 63695070 R0672:F11.

[1066] SEQ ID NO:1028 is the determined cDNA sequence for clone 63695071 R0672:F12.

[1067] SEQ ID NO:1029 is the determined cDNA sequence for clone 63695072 R0672:G01.

[1068] SEQ ID NO:1030 is the determined cDNA sequence for clone 63695073 R0672:G02.

[1069] SEQ ID NO:1031 is the determined cDNA sequence for clone 63695074 R0672:G03.

[1070] SEQ ID NO:1032 is the determined cDNA sequence for clone 63695075 R0672:G04.

[1071] SEQ ID NO:1033 is the determined cDNA sequence for clone 63695076 R0672:G05.

[1072] SEQ ID NO:1034 is the determined cDNA sequence for clone 63695077 R0672:G06.

[1073] SEQ ID NO:1035 is the determined cDNA sequence for clone 63695078 R0672:G07.

[1074] SEQ ID NO:1036 is the determined cDNA sequence for clone 63695079 R0672:G08.

[1075] SEQ ID NO: 1037 is the determined cDNA sequence for clone 63695080 R0672:G09.

[1076] SEQ ID NO:1038 is the determined cDNA sequence for clone 63695081 R0672:G10.

[1077] SEQ ID NO:1039 is the determined cDNA sequence for clone 63695082 R0672:G11.

[1078] SEQ ID NO:1040 is the determined cDNA sequence for clone 63695083 R0672:G12.

[1079] SEQ ID NO:1041 is the determined cDNA sequence for clone 63695085 R0672:H02.

[1080] SEQ ID NO:1042 is the determined cDNA sequence for clone 63695086 R0672:H03.

[1081] SEQ ID NO:1043 is the determined cDNA sequence for clone 63695087 R0672:H04.

[1082] SEQ ID NO:1044 is the determined cDNA sequence for clone 63695088 R0672:H05.

[1083] SEQ ID NO: 1045 is the determined cDNA sequence for clone 63695089 R0672:H06.

[1084] SEQ ID NO:1046 is the determined cDNA sequence for clone 63695090 R0672:H07.

[1085] SEQ ID NO:1047 is the determined cDNA sequence for clone 63695091 R0672:H08.

[1086] SEQ ID NO:1048 is the determined cDNA sequence for clone 63695092 R0672:H09.

[1087] SEQ ID NO:1049 is the determined cDNA sequence for clone 63695093 R0672:H10.

[1088] SEQ ID NO:1050 is the determined cDNA sequence for clone 63695094 R0672:H11.

[1089] SEQ ID NO:1051 is the determined cDNA sequence for clone 63695282 R0673:A03.

[1090] SEQ ID NO:1052 is the determined cDNA sequence for clone 63695284 R0673:A06.

[1091] SEQ ID NO: 1053 is the determined cDNA sequence for clone 63695285 R0673:A07.

[1092] SEQ ID NO:1054 is the determined cDNA sequence for clone 63695286 R0673:A08.

[1093] SEQ ID NO:1055 is the determined cDNA sequence for clone 63695287 R0673:A09.

[1094] SEQ ID NO:1056 is the determined cDNA sequence for clone 63695289 R0673:A11.

[1095] SEQ ID NO:1057 is the determined cDNA sequence for clone 63695290 R0673:A12.

[1096] SEQ ID NO:1058 is the determined cDNA sequence for clone 63695291 R0673:B01.

[1097] SEQ ID NO:1059 is the determined cDNA sequence for clone 63695292 R0673:B02.

[1098] SEQ ID NO:1060 is the determined cDNA sequence for clone 63695294 R0673:B04.

[1099] SEQ ID NO:1061 is the determined cDNA sequence for clone 63695295 R0673:B05.

[1100] SEQ ID NO:1062 is the determined cDNA sequence for clone 63695296 R0673:B06.

[1101] SEQ ID NO:1063 is the determined cDNA sequence for clone 63695297 R0673:B07.

[1102] SEQ ID NO:1064 is the determined cDNA sequence for clone 63695298 R0673:B08.

[1103] SEQ ID NO:1065 is the determined cDNA sequence for clone 63695301 R0673:B1.

[1104] SEQ ID NO:1066 is the determined cDNA sequence for clone 63695303 R0673:C01.

[1105] SEQ ID NO:1067 is the determined cDNA sequence for clone 63695304 R0673:C02.

[1106] SEQ ID NO:1068 is the determined cDNA sequence for clone 63695305 R0673:C03.

[1107] SEQ ID NO:1069 is the determined cDNA sequence for clone 63695306 R0673:C04.

[1108] SEQ ID NO:1070 is the determined cDNA sequence for clone 63695307 R0673:C05.

[1109] SEQ ID NO:1071 is the determined cDNA sequence for clone 63695308 R0673:C06.

[1110] SEQ ID NO:1072 is the determined cDNA sequence for clone 63695310 R0673:C08.

[1111] SEQ ID NO:1073 is the determined cDNA sequence for clone 63695311 R0673:C09.

[1112] SEQ ID NO:1074 is the determined cDNA sequence for clone 63695312 R0673:C10.

[1113] SEQ ID NO:1075 is the determined cDNA sequence for clone 63695313 R0673:C11.

[1114] SEQ ID NO:1076 is the determined cDNA sequence for clone 63695314 R0673:C12.

[1115] SEQ ID NO:1077 is the determined cDNA sequence for clone 63695315 R0673:D01.

[1116] SEQ ID NO:1078 is the determined cDNA sequence for clone 63695316 R0673:D02.

[1117] SEQ ID NO:1079 is the determined cDNA sequence for clone 63695317 R0673:D03.

[1118] SEQ ID NO:1080 is the determined cDNA sequence for clone 63695318 R0673:D04.

[1119] SEQ ID NO:1081 is the determined cDNA sequence for clone 63695319 R0673:D05.

[1120] SEQ ID NO:1082 is the determined cDNA sequence for clone 63695320 R0673:D06.

[1121] SEQ ID NO:1083 is the determined cDNA sequence for clone 63695321 R0673:D07.

[1122] SEQ ID NO:1084 is the determined cDNA sequence for clone 63695323 R0673:D09.

[1123] SEQ ID NO:1085 is the determined cDNA sequence for clone 63695324 R0673:D10.

[1124] SEQ ID NO:1086 is the determined cDNA sequence for clone 63695325 R0673:D 1.

[1125] SEQ ID NO:1087 is the determined cDNA sequence for clone 63695326 R0673:D12.

[1126] SEQ ID NO:1088 is the determined cDNA sequence for clone 63695327 R0673:E01.

[1127] SEQ ID NO:1089 is the determined cDNA sequence for clone 63695328 R0673:E02.

[1128] SEQ ID NO:1090 is the determined cDNA sequence for clone 63695329 R0673:E03.

[1129] SEQ ID NO:1091 is the determined cDNA sequence for clone 63695330 R0673:E04.

[1130] SEQ ID NO:1092 is the determined cDNA sequence for clone 63695331 R0673:E05.

[1131] SEQ ID NO: 1093 is the determined cDNA sequence for clone 63695333 R0673:E07.

[1132] SEQ ID NO:1094 is the determined cDNA sequence for clone 63695334 R0673:E08.

[1133] SEQ ID NO:1095 is the determined cDNA sequence for clone 63695335 R0673:E09.

[1134] SEQ ID NO:1096 is the determined cDNA sequence for clone 63695337 R0673:E11.

[1135] SEQ ID NO:1097 is the determined cDNA sequence for clone 63695338 R0673:E12.

[1136] SEQ ID NO:1098 is the determined cDNA sequence for clone 63695339 R0673:F01.

[1137] SEQ ID NO:1099 is the determined cDNA sequence for clone 63695341 R0673:F03.

[1138] SEQ ID NO:1100 is the determined cDNA sequence for clone 63695342 R0673:F04.

[1139] SEQ ID NO:1101 is the determined cDNA sequence for clone 63695344 R0673:F06.

[1140] SEQ ID NO:1102 is the determined cDNA sequence for clone 63695346 R0673:F08.

[1141] SEQ ID NO:1103 is the determined cDNA sequence for clone 63695347 R0673:F09.

[1142] SEQ ID NO:1104 is the determined cDNA sequence for clone 63695348 R0673:F10.

[1143] SEQ ID NO: 1105 is the determined cDNA sequence for clone 63695349 R0673:F11.

[1144] SEQ ID NO:1106 is the determined cDNA sequence for clone 63695350 R0673:F12.

[1145] SEQ ID NO:1107 is the determined cDNA sequence for clone 63695351 R0673:G01.

[1146] SEQ ID NO:1108 is the determined cDNA sequence for clone 63695352 R0673:G02.

[1147] SEQ ID NO:1109 is the determined cDNA sequence for clone 63695353 R0673:G03.

[1148] SEQ ID NO:1110 is the determined cDNA sequence for clone 63695354 R0673:G04.

[1149] SEQ ID NO:1111 is the determined cDNA sequence for clone 63695356 R0673:G06.

[1150] SEQ ID NO:1112 is the determined cDNA sequence for clone 63695357 R0673:G07.

[1151] SEQ ID NO:1113 is the determined cDNA sequence for clone 63695358 R0673:G08.

[1152] SEQ ID NO:1114 is the determined cDNA sequence for clone 63695359 R0673:G09.

[1153] SEQ ID NO:1115 is the determined cDNA sequence for clone 63695361 R0673:G11.

[1154] SEQ ID NO:1116 is the determined cDNA sequence for clone 63695363 R0673:H01.

[1155] SEQ ID NO:1117 is the determined cDNA sequence for clone 63695364 R0673:H02.

[1156] SEQ ID NO:1118 is the determined cDNA sequence for clone 63695366 R0673:H04.

[1157] SEQ ID NO:1119 is the determined cDNA sequence for clone 63695367 R0673:H05.

[1158] SEQ ID NO:1120 is the determined cDNA sequence for clone 63695368 R0673:H06.

[1159] SEQ ID NO:1121 is the determined cDNA sequence for clone 63695369 R0673:H07.

[1160] SEQ ID NO:1122 is the determined cDNA sequence for clone 63695370 R0673:H08.

[1161] SEQ ID NO:1123 is the determined cDNA sequence for clone 63695371 R0673:H09.

[1162] SEQ ID NO:1124 is the determined cDNA sequence for clone 63695372 R0673:H 10.

[1163] SEQ ID NO: 1125 is the determined cDNA sequence for clone 63695373 R0673:H 1.

[1164] SEQ ID NO:1126 is the determined cDNA sequence for clone 63695188 R0674:A02.

[1165] SEQ ID NO:1127 is the determined cDNA sequence for clone 63695189 R0674:A03.

[1166] SEQ ID NO:1128 is the determined cDNA sequence for clone 63695190 R0674:A05.

[1167] SEQ ID NO:1129 is the determined cDNA sequence for clone 63695191 R0674:A06.

[1168] SEQ ID NO:1130 is the determined cDNA sequence for clone 63695192 R0674:A07.

[1169] SEQ ID NO:1131 is the determined cDNA sequence for clone 63695194 R0674:A09.

[1170] SEQ ID NO:1132 is the determined cDNA sequence for clone 63695196 R0674:A11.

[1171] SEQ ID NO:1133 is the determined cDNA sequence for clone 63695197 R0674:A12.

[1172] SEQ ID NO:1134 is the determined cDNA sequence for clone 63695198 R0674:B01.

[1173] SEQ ID NO:1135 is the determined cDNA sequence for clone 63695199 R0674:B02.

[1174] SEQ ID NO:1136 is the determined cDNA sequence for clone 63695200 R0674:B03.

[1175] SEQ ID NO:1137 is the determined cDNA sequence for clone 63695202 R0674:B05.

[1176] SEQ ID NO:1138 is the determined cDNA sequence for clone 63695203 R0674:B06.

[1177] SEQ ID NO:1139 is the determined cDNA sequence for clone 63695205 R0674:B08.

[1178] SEQ ID NO:1140 is the determined cDNA sequence for clone 63695206 R0674:B09.

[1179] SEQ ID NO:1141 is the determined cDNA sequence for clone 63695207 R0674:B10.

[1180] SEQ ID NO:1142 is the determined cDNA sequence for clone 63695208 R0674:B11.

[1181] SEQ ID NO:1143 is the determined cDNA sequence for clone 63695209 R0674:B12.

[1182] SEQ ID NO:1144 is the determined cDNA sequence for clone 63695210 R0674:C01.

[1183] SEQ ID NO:1145 is the determined cDNA sequence for clone 63695212 R0674:C03.

[1184] SEQ ID NO:1146 is the determined cDNA sequence for clone 63695213 R0674:C04.

[1185] SEQ ID NO:1147 is the determined cDNA sequence for clone 63695214 R0674:C05.

[1186] SEQ ID NO:1148 is the determined cDNA sequence for clone 63695216 R0674:C07.

[1187] SEQ ID NO:1149 is the determined cDNA sequence for clone 63695218 R0674:C09.

[1188] SEQ ID NO:1150 is the determined cDNA sequence for clone 63695220 R0674:C11.

[1189] SEQ ID NO:1151 is the determined cDNA sequence for clone 63695221 R0674:C12.

[1190] SEQ ID NO:1152 is the determined cDNA sequence for clone 63695223 R0674:D02.

[1191] SEQ ID NO:1153 is the determined cDNA sequence for clone 63695224 R0674:D03.

[1192] SEQ ID NO:1154 is the determined cDNA sequence for clone 63695225 R0674:D04.

[1193] SEQ ID NO:1155 is the determined cDNA sequence for clone 63695226 R0674:D05.

[1194] SEQ ID NO:1156 is the determined cDNA sequence for clone 63695227 R0674:D06.

[1195] SEQ ID NO:1157 is the determined cDNA sequence for clone 63695228 R0674:D07.

[1196] SEQ ID NO:1158 is the determined cDNA sequence for clone 63695234 R0674:E01.

[1197] SEQ ID NO:1159 is the determined cDNA sequence for clone 63695236 R0674:E03.

[1198] SEQ ID NO:1160 is the determined cDNA sequence for clone 63695237 R0674:E04.

[1199] SEQ ID NO:1161 is the determined cDNA sequence for clone 63695238 R0674:E05.

[1200] SEQ ID NO:1162 is the determined cDNA sequence for clone 63695241 R0674:E08.

[1201] SEQ ID NO:1163 is the determined cDNA sequence for clone 63695244 R0674:E11.

[1202] SEQ ID NO:1164 is the determined cDNA sequence for clone 63695247 R0674:F02.

[1203] SEQ ID NO:1165 is the determined cDNA sequence for clone 63695248 R0674:F03.

[1204] SEQ ID NO:1166 is the determined cDNA sequence for clone 63695249 R0674:F04.

[1205] SEQ ID NO:1167 is the determined cDNA sequence for clone 63695250 R0674:F05.

[1206] SEQ ID NO:1168 is the determined cDNA sequence for clone 63695251 R0674:F06.

[1207] SEQ ID NO:1169 is the determined cDNA sequence for clone 63695252 R0674:F07.

[1208] SEQ ID NO:1170 is the determined cDNA sequence for clone 63695255 R0674:F10.

[1209] SEQ ID NO:1171 is the determined cDNA sequence for clone 63695256 R0674:F11.

[1210] SEQ ID NO:1172 is the determined cDNA sequence for clone 63695257 R0674:F12.

[1211] SEQ ID NO:1173 is the determined cDNA sequence for clone 63695261 R0674:G04.

[1212] SEQ ID NO:1174 is the determined cDNA sequence for clone 63695262 R0674:G05.

[1213] SEQ ID NO:1175 is the determined cDNA sequence for clone 63695263 R0674:G06.

[1214] SEQ ID NO:1176 is the determined cDNA sequence for clone 63695264 R0674:G07.

[1215] SEQ ID NO:1177 is the determined cDNA sequence for clone 63695265 R0674:G08.

[1216] SEQ ID NO:1178 is the determined cDNA sequence for clone 63695266 R0674:G09.

[1217] SEQ ID NO:1179 is the determined cDNA sequence for clone 63695267 R0674:G10.

[1218] SEQ ID NO:1180 is the determined cDNA sequence for clone 63695268 R0674:G11.

[1219] SEQ ID NO: 1181 is the determined cDNA sequence for clone 63695270 R0674:H01.

[1220] SEQ ID NO:1182 is the determined cDNA sequence for clone 63695271 R0674:H02.

[1221] SEQ ID NO:1183 is the determined cDNA sequence for clone 63695272 R0674:H03.

[1222] SEQ ID NO:1184 is the determined cDNA sequence for clone 63695273 R0674:H04.

[1223] SEQ ID NO:1185 is the determined cDNA sequence for clone 63695274 R0674:H05.

[1224] SEQ ID NO:1186 is the determined cDNA sequence for clone 63695275 R0674:H06.

[1225] SEQ ID NO:1187 is the determined cDNA sequence for clone 63695276 R0674:H07.

[1226] SEQ ID NO:1188 is the determined cDNA sequence for clone 63695278 R0674:H09.

[1227] SEQ ID NO:1189 is the determined cDNA sequence for clone 63695279 R0674:H10.

[1228] SEQ ID NO:1190 is the determined cDNA sequence for clone 63695280 R0674:H11.

[1229] SEQ ID NO:1191 is the determined cDNA sequence for clone 63694910 R0675:A03.

[1230] SEQ ID NO:1192 is the determined cDNA sequence for clone 63694911 R0675:A05.

[1231] SEQ ID NO:1193 is the determined cDNA sequence for clone 63694912 R0675:A06.

[1232] SEQ ID NO:1194 is the determined cDNA sequence for clone 63694913 R0675:A07.

[1233] SEQ ID NO:1195 is the determined cDNA sequence for clone 63694914 R0675:A08.

[1234] SEQ ID NO:1196 is the determined cDNA sequence for clone 63694915 R0675:A09.

[1235] SEQ ID NO:1197 is the determined cDNA sequence for clone 63694916 R0675:A10.

[1236] SEQ ID NO:1198 is the determined cDNA sequence for clone 63694917 R0675:A 1.

[1237] SEQ ID NO:1199 is the determined cDNA sequence for clone 63694918 R0675:A12.

[1238] SEQ ID NO:1200 is the determined cDNA sequence for clone 63694919 R0675:B01.

[1239] SEQ ID NO:1201 is the determined cDNA sequence for clone 63694920 R0675:B02.

[1240] SEQ ID NO:1202 is the determined cDNA sequence for clone 63694921 R0675:B03.

[1241] SEQ ID NO:1203 is the determined cDNA sequence for clone 63694922 R0675:B04.

[1242] SEQ ID NO:1204 is the determined cDNA sequence for clone 63694923 R0675:B05.

[1243] SEQ ID NO:1205 is the determined cDNA sequence for clone 63694924 R0675:B06.

[1244] SEQ ID NO:1206 is the determined cDNA sequence for clone 63694925 R0675:B07.

[1245] SEQ ID NO:1207 is the determined cDNA sequence for clone 63694926 R0675:B08.

[1246] SEQ ID NO:1208 is the determined cDNA sequence for clone 63694927 R0675:B09.

[1247] SEQ ID NO:1209 is the determined cDNA sequence for clone 63694928 R0675:B10.

[1248] SEQ ID NO:1210 is the determined cDNA sequence for clone 63694929 R0675:B11.

[1249] SEQ ID NO:1211 is the determined cDNA sequence for clone 63694930 R0675:B12.

[1250] SEQ ID NO:1212 is the determined cDNA sequence for clone 63694931 R0675:C01.

[1251] SEQ ID NO:1213 is the determined cDNA sequence for clone 63694932 R0675:C02.

[1252] SEQ ID NO:1214 is the determined cDNA sequence for clone 63694934 R0675:C04.

[1253] SEQ ID NO:1215 is the determined cDNA sequence for clone 63694935 R0675:C05.

[1254] SEQ ID NO:1216 is the determined cDNA sequence for clone 63694936 R0675:C06.

[1255] SEQ ID NO:1217 is the determined cDNA sequence for clone 63694937 R0675:C07.

[1256] SEQ ID NO:1218 is the determined cDNA sequence for clone 63694938 R0675:C08.

[1257] SEQ ID NO:1219 is the determined cDNA sequence for clone 63694939 R0675:C09.

[1258] SEQ ID NO:1220 is the determined cDNA sequence for clone 63694940 R0675:C10.

[1259] SEQ ID NO:1221 is the determined cDNA sequence for clone 63694941 R0675:C 1.

[1260] SEQ ID NO:1222 is the determined cDNA sequence for clone 63694943 R0675:D01.

[1261] SEQ ID NO:1223 is the determined cDNA sequence for clone 63694944 R0675:D02.

[1262] SEQ ID NO: 1224 is the determined cDNA sequence for clone 63694946 R0675:D04.

[1263] SEQ ID NO:1225 is the determined cDNA sequence for clone 63694947 R0675:D05.

[1264] SEQ ID NO:1226 is the determined cDNA sequence for clone 63694948 R0675:D06.

[1265] SEQ ID NO:1227 is the determined cDNA sequence for clone 63694949 R0675:D07.

[1266] SEQ ID NO:1228 is the determined cDNA sequence for clone 63694950 R0675:D08.

[1267] SEQ ID NO:1229 is the determined cDNA sequence for clone 63694952 R0675:D10.

[1268] SEQ ID NO: 1230 is the determined cDNA sequence for clone 63694953 R0675:D11.

[1269] SEQ ID NO:1231 is the determined cDNA sequence for clone 63694954 R0675:D12.

[1270] SEQ ID NO:1232 is the determined cDNA sequence for clone 63694955 R0675:E01.

[1271] SEQ ID NO:1233 is the determined cDNA sequence for clone 63694958 R0675:E04.

[1272] SEQ ID NO:1234 is the determined cDNA sequence for clone 63694959 R0675:E05.

[1273] SEQ ID NO:1235 is the determined cDNA sequence for clone 63694960 R0675:E06.

[1274] SEQ ID NO:1236 is the determined cDNA sequence for clone 63694961 R0675:E07.

[1275] SEQ ID NO:1237 is the determined cDNA sequence for clone 63694962 R0675:E08.

[1276] SEQ ID NO:1238 is the determined cDNA sequence for clone 63694963 R0675:E09.

[1277] SEQ ID NO:1239 is the determined cDNA sequence for clone 63694964 R0675:E10.

[1278] SEQ ID NO:1240 is the determined cDNA sequence for clone 63694966 R0675:E12.

[1279] SEQ ID NO:1241 is the determined cDNA sequence for clone 63694967 R0675:F01.

[1280] SEQ ID NO:1242 is the determined cDNA sequence for clone 63694968 R0675:F02.

[1281] SEQ ID NO:1243 is the determined cDNA sequence for clone 63694969 R0675:F03.

[1282] SEQ ID NO:1244 is the determined cDNA sequence for clone 63694970 R0675:F04.

[1283] SEQ ID NO:1245 is the determined cDNA sequence for clone 63694971 R0675:F05.

[1284] SEQ ID NO:1246 is the determined cDNA sequence for clone 63694972 R0675:F06.

[1285] SEQ ID NO:1247 is the determined cDNA sequence for clone 63694973 R0675:F07.

[1286] SEQ ID NO:1248 is the determined cDNA sequence for clone 63694974 R0675:F08.

[1287] SEQ ID NO:1249 is the determined cDNA sequence for clone 63694975 R0675:F09.

[1288] SEQ ID NO:1250 is the determined cDNA sequence for clone 63694976 R0675:F10.

[1289] SEQ ID NO:1251 is the determined cDNA sequence for clone 63694977 R0675:F11.

[1290] SEQ ID NO:1252 is the determined cDNA sequence for clone 63694978 R0675:F12.

[1291] SEQ ID NO:1253 is the determined cDNA sequence for clone 63694979 R0675:G01.

[1292] SEQ ID NO:1254 is the determined cDNA sequence for clone 63694980 R0675:G02.

[1293] SEQ ID NO:1255 is the determined cDNA sequence for clone 63694981 R0675:G03.

[1294] SEQ ID NO:1256 is the determined cDNA sequence for clone 63694982 R0675:G04.

[1295] SEQ ID NO:1257 is the determined cDNA sequence for clone 63694983 R0675:G05.

[1296] SEQ ID NO: 1258 is the determined cDNA sequence for clone 63694984 R0675:G06.

[1297] SEQ ID NO:1259 is the determined cDNA sequence for clone 63694985 R0675:G07.

[1298] SEQ ID NO:1260 is the determined cDNA sequence for clone 63694986 R0675:G08.

[1299] SEQ ID NO:1261 is the determined cDNA sequence for clone 63694987 R0675:G09.

[1300] SEQ ID NO:1262 is the determined cDNA sequence for clone 63694988 R0675:G10.

[1301] SEQ ID NO:1263 is the determined cDNA sequence for clone 63694990 R0675:G12.

[1302] SEQ ID NO:1264 is the determined cDNA sequence for clone 63694991 R0675:H01.

[1303] SEQ ID NO:1265 is the determined cDNA sequence for clone 63694992 R0675:H02.

[1304] SEQ ID NO:1266 is the determined cDNA sequence for clone 63694993 R0675:H03.

[1305] SEQ ID NO:1267 is the determined cDNA sequence for clone 63694995 R0675:H05.

[1306] SEQ ID NO:1268 is the determined cDNA sequence for clone 63694996 R0675:H06.

[1307] SEQ ID NO:1269 is the determined cDNA sequence for clone 63694997 R0675:H07.

[1308] SEQ ID NO:1270 is the determined cDNA sequence for clone 63694999 R0675:H09.

[1309] SEQ ID NO:1271 is the determined cDNA sequence for clone 63695000 R0675:H10.

[1310] SEQ ID NO:1272 is the determined cDNA sequence for clone 63695746 R0676:A02.

[1311] SEQ ID NO:1273 is the determined cDNA sequence for clone 63695747 R0676:A03.

[1312] SEQ ID NO:1274 is the determined cDNA sequence for clone 63695748 R0676:A05.

[1313] SEQ ID NO:1275 is the determined cDNA sequence for clone 63695749 R0676:A06.

[1314] SEQ ID NO:1276 is the determined cDNA sequence for clone 63695750 R0676:A07.

[1315] SEQ ID NO:1277 is the determined cDNA sequence for clone 63695751 R0676:A08.

[1316] SEQ ID NO:1278 is the determined cDNA sequence for clone 63695752 R0676:A09.

[1317] SEQ ID NO:1279 is the determined cDNA sequence for clone 63695754 R0676:A 11.

[1318] SEQ ID NO:1280 is the determined cDNA sequence for clone 63695755 R0676:A12.

[1319] SEQ ID NO:1281 is the determined cDNA sequence for clone 63695756 R0676:B01.

[1320] SEQ ID NO:1282 is the determined cDNA sequence for clone 63695758 R0676:B03.

[1321] SEQ ID NO:1283 is the determined cDNA sequence for clone 63695759 R0676:B04.

[1322] SEQ ID NO:1284 is the determined cDNA sequence for clone 63695760 R0676:B05.

[1323] SEQ ID NO:1285 is the determined cDNA sequence for clone 63695762 R0676:B07.

[1324] SEQ ID NO:1286 is the determined cDNA sequence for clone 63695764 R0676:B09.

[1325] SEQ ID NO:1287 is the determined cDNA sequence for clone 63695766 R0676:B11.

[1326] SEQ ID NO:1288 is the determined cDNA sequence for clone 63695769 R0676:C02.

[1327] SEQ ID NO:1289 is the determined cDNA sequence for clone 63695770 R0676:C03.

[1328] SEQ ID NO:1290 is the determined cDNA sequence for clone 63695771 R0676:C04.

[1329] SEQ ID NO:1291 is the determined cDNA sequence for clone 63695772 R0676:C05.

[1330] SEQ ID NO:1292 is the determined cDNA sequence for clone 63695773 R0676:C06.

[1331] SEQ ID NO:1293 is the determined cDNA sequence for clone 63695774 R0676:C07.

[1332] SEQ ID NO:1294 is the determined cDNA sequence for clone 63695775 R0676:C08.

[1333] SEQ ID NO:1295 is the determined cDNA sequence for clone 63695777 R0676:C10.

[1334] SEQ ID NO:1296 is the determined cDNA sequence for clone 63695778 R0676:C11.

[1335] SEQ ID NO:1297 is the determined cDNA sequence for clone 63695779 R0676:C12.

[1336] SEQ ID NO:1298 is the determined cDNA sequence for clone 63695780 R0676:D01.

[1337] SEQ ID NO:1299 is the determined cDNA sequence for clone 63695782 R0676:D03.

[1338] SEQ ID NO:1300 is the determined cDNA sequence for clone 63695784 R0676:D05.

[1339] SEQ ID NO:1301 is the determined cDNA sequence for clone 63695786 R0676:D07.

[1340] SEQ ID NO:1302 is the determined cDNA sequence for clone 63695787 R0676:D08.

[1341] SEQ ID NO:1303 is the determined cDNA sequence for clone 63695788 R0676:D09.

[1342] SEQ ID NO:1304 is the determined cDNA sequence for clone 63695790 R0676:D11.

[1343] SEQ ID NO:1305 is the determined cDNA sequence for clone 63695791 R0676:D12.

[1344] SEQ ID NO:1306 is the determined cDNA sequence for clone 63695792 R0676:E01.

[1345] SEQ ID NO:1307 is the determined cDNA sequence for clone 63695793 R0676:E02.

[1346] SEQ ID NO:1308 is the determined cDNA sequence for clone 63695794 R0676:E03.

[1347] SEQ ID NO:1309 is the determined cDNA sequence for clone 63695796 R0676:E05.

[1348] SEQ ID NO:1310 is the determined cDNA sequence for clone 63695797 R0676:E06.

[1349] SEQ ID NO:1311 is the determined cDNA sequence for clone 63695798 R0676:E07.

[1350] SEQ ID NO:1312 is the determined cDNA sequence for clone 63695803 R0676:E12.

[1351] SEQ ID NO:1313 is the determined cDNA sequence for clone 63695804 R0676:F01.

[1352] SEQ ID NO:1314 is the determined cDNA sequence for clone 63695806 R0676:F03.

[1353] SEQ ID NO:1315 is the determined cDNA sequence for clone 63695807 R0676:F04.

[1354] SEQ ID NO:1316 is the determined cDNA sequence for clone 63695808 R0676:F05.

[1355] SEQ ID NO:1317 is the determined cDNA sequence for clone 63695809 R0676:F06.

[1356] SEQ ID NO:1318 is the determined cDNA sequence for clone 63695810 R0676:F07.

[1357] SEQ ID NO:1319 is the determined cDNA sequence for clone 63695811 R0676:F08.

[1358] SEQ ID NO:1320 is the determined cDNA sequence for clone 63695812 R0676:F09.

[1359] SEQ ID NO:1321 is the determined cDNA sequence for clone 63695813 R0676:F10.

[1360] SEQ ID NO:1322 is the determined cDNA sequence for clone 63695814 R0676:F11.

[1361] SEQ ID NO:1323 is the determined cDNA sequence for clone 63695815 R0676:F12.

[1362] SEQ ID NO: 1324 is the determined cDNA sequence for clone 63695816 R0676:G01.

[1363] SEQ ID NO:1325 is the determined cDNA sequence for clone 63695817 R0676:G02.

[1364] SEQ ID NO:1326 is the determined cDNA sequence for clone 63695818 R0676:G03.

[1365] SEQ ID NO:1327 is the determined cDNA sequence for clone 63695820 R0676:G05.

[1366] SEQ ID NO:1328 is the determined cDNA sequence for clone 63695822 R0676:G07.

[1367] SEQ ID NO:1329 is the determined cDNA sequence for clone 63695823 R0676:G08.

[1368] SEQ ID NO: 1330 is the determined cDNA sequence for clone 63695824 R0676:G09.

[1369] SEQ ID NO:1331 is the determined cDNA sequence for clone 63695825 R0676:G10.

[1370] SEQ ID NO:1332 is the determined cDNA sequence for clone 63695826 R0676:G11.

[1371] SEQ ID NO:1333 is the determined cDNA sequence for clone 63695827 R0676:G12.

[1372] SEQ ID NO:1334 is the determined cDNA sequence for clone 63695828 R0676:H01.

[1373] SEQ ID NO:1335 is the determined cDNA sequence for clone 63695829 R0676:H02.

[1374] SEQ ID NO:1336 is the determined cDNA sequence for clone 63695830 R0676:H03.

[1375] SEQ ID NO:1337 is the determined cDNA sequence for clone 63695831 R0676:H04.

[1376] SEQ ID NO:1338 is the determined cDNA sequence for clone 63695832 R0676:H05.

[1377] SEQ ID NO:1339 is the determined cDNA sequence for clone 63695833 R0676:H06.

[1378] SEQ ID NO:1340 is the determined cDNA sequence for clone 63695834 R0676:H07.

[1379] SEQ ID NO:1341 is the determined cDNA sequence for clone 63695835 R0676:H08.

[1380] SEQ ID NO:1342 is the determined cDNA sequence for clone 63695836 R0676:H09.

[1381] SEQ ID NO:1343 is the determined cDNA sequence for clone 63695837 R0676:H10.

[1382] SEQ ID NO:1344 is the determined cDNA sequence for clone 63695838 R0676:H11.

[1383] SEQ ID NO:1345 is the determined cDNA sequence for clone 63695374 R0677:A02.

[1384] SEQ ID NO:1346 is the determined cDNA sequence for clone 63695375 R0677:A03.

[1385] SEQ ID NO:1347 is the determined cDNA sequence for clone 63695376 R0677:A05.

[1386] SEQ ID NO:1348 is the determined cDNA sequence for clone 63695378 R0677:A07.

[1387] SEQ ID NO:1349 is the determined cDNA sequence for clone 63695379 R0677:A08.

[1388] SEQ ID NO:1350 is the determined cDNA sequence for clone 63695380 R0677:A09.

[1389] SEQ ID NO:1351 is the determined cDNA sequence for clone 63695381 R0677:A10.

[1390] SEQ ID NO:1352 is the determined cDNA sequence for clone 63695382 R0677:A11.

[1391] SEQ ID NO:1353 is the determined cDNA sequence for clone 63695383 R0677:A12.

[1392] SEQ ID NO:1354 is the determined cDNA sequence for clone 63695384 R0677:B01.

[1393] SEQ ID NO:1355 is the determined cDNA sequence for clone 63695386 R0677:B03.

[1394] SEQ ID NO:1356 is the determined cDNA sequence for clone 63695387 R0677:B04.

[1395] SEQ ID NO:1357 is the determined cDNA sequence for clone 63695388 R0677:B05.

[1396] SEQ ID NO:1358 is the determined cDNA sequence for clone 63695389 R0677:B06.

[1397] SEQ ID NO:1359 is the determined cDNA sequence for clone 63695390 R0677:B07.

[1398] SEQ ID NO:1360 is the determined cDNA sequence for clone 63695391 R0677:B08.

[1399] SEQ ID NO:1361 is the determined cDNA sequence for clone 63695392 R0677:B09.

[1400] SEQ ID NO:1362 is the determined cDNA sequence for clone 63695393 R0677:B10.

[1401] SEQ ID NO:1363 is the determined cDNA sequence for clone 63695394 R0677:B11.

[1402] SEQ ID NO: 1364 is the determined cDNA sequence for clone 63695395 R0677:B12.

[1403] SEQ ID NO:1365 is the determined cDNA sequence for clone 63695397 R0677:C02.

[1404] SEQ ID NO:1366 is the determined cDNA sequence for clone 63695398 R0677:C03.

[1405] SEQ ID NO:1367 is the determined cDNA sequence for clone 63695399 R0677:C04.

[1406] SEQ ID NO:1368 is the determined cDNA sequence for clone 63695400 R0677:C05.

[1407] SEQ ID NO:1369 is the determined cDNA sequence for clone 63695401 R0677:C06.

[1408] SEQ ID NO:1370 is the determined cDNA sequence for clone 63695402 R0677:C07.

[1409] SEQ ID NO:1371 is the determined cDNA sequence for clone 63695403 R0677:C08.

[1410] SEQ ID NO:1372 is the determined cDNA sequence for clone 63695404 R0677:C09.

[1411] SEQ ID NO:1373 is the determined cDNA sequence for clone 63695405 R0677:C10.

[1412] SEQ ID NO:1374 is the determined cDNA sequence for clone 63695406 R0677:C11.

[1413] SEQ ID NO:1375 is the determined cDNA sequence for clone 63695408 R0677:D01.

[1414] SEQ ID NO:1376 is the determined cDNA sequence for clone 63695409 R0677: D02.

[1415] SEQ ID NO:1377 is the determined cDNA sequence for clone 63695411 R0677:D04.

[1416] SEQ ID NO:1378 is the determined cDNA sequence for clone 63695412 R0677:D05.

[1417] SEQ ID NO:1379 is the determined cDNA sequence for clone 63695413 R0677:D06.

[1418] SEQ ID NO:1380 is the determined cDNA sequence for clone 63695414 R0677:D07.

[1419] SEQ ID NO:1381 is the determined cDNA sequence for clone 63695415 R0677:D08.

[1420] SEQ ID NO:1382 is the determined cDNA sequence for clone 63695416 R0677:D09.

[1421] SEQ ID NO:1383 is the determined cDNA sequence for clone 63695418 R0677:D11.

[1422] SEQ ID NO:1384 is the determined cDNA sequence for clone 63695419 R0677:D12.

[1423] SEQ ID NO:1385 is the determined cDNA sequence for clone 63695420 R0677:E01.

[1424] SEQ ID NO:1386 is the determined cDNA sequence for clone 63695421 R0677:E02.

[1425] SEQ ID NO:1387 is the determined cDNA sequence for clone 63695422 R0677:E03.

[1426] SEQ ID NO:1388 is the determined cDNA sequence for clone 63695423 R0677:E04.

[1427] SEQ ID NO:1389 is the determined cDNA sequence for clone 63695424 R0677:E05.

[1428] SEQ ID NO:1390 is the determined cDNA sequence for clone 63695425 R0677:E06.

[1429] SEQ ID NO:1391 is the determined cDNA sequence for clone 63695426 R0677:E07.

[1430] SEQ ID NO:1392 is the determined cDNA sequence for clone 63695427 R0677:E08.

[1431] SEQ ID NO:1393 is the determined cDNA sequence for clone 63695428 R0677:E09.

[1432] SEQ ID NO:1394 is the determined cDNA sequence for clone 63695429 R0677:E10.

[1433] SEQ ID NO:1395 is the determined cDNA sequence for clone 63695430 R0677:E11.

[1434] SEQ ID NO:1396 is the determined cDNA sequence for clone 63695431 R0677:E12.

[1435] SEQ ID NO:1397 is the determined cDNA sequence for clone 63695432 R0677:F01.

[1436] SEQ ID NO:1398 is the determined cDNA sequence for clone 63695433 R0677:F02.

[1437] SEQ ID NO:1399 is the determined cDNA sequence for clone 63695434 R0677:F03.

[1438] SEQ ID NO:1400 is the determined cDNA sequence for clone 63695435 R0677:F04.

[1439] SEQ ID NO:1401 is the determined cDNA sequence for clone 63695436 R0677:F05.

[1440] SEQ ID NO:1402 is the determined cDNA sequence for clone 63695437 R0677:F06.

[1441] SEQ ID NO:1403 is the determined cDNA sequence for clone 63695439 R0677:F08.

[1442] SEQ ID NO:1404 is the determined cDNA sequence for clone 63695440 R0677:F09.

[1443] SEQ ID NO:1405 is the determined cDNA sequence for clone 63695442 R0677:F11.

[1444] SEQ ID NO: 1406 is the determined cDNA sequence for clone 63695443 R0677:F12.

[1445] SEQ ID NO:1407 is the determined cDNA sequence for clone 63695444 R0677:G01.

[1446] SEQ ID NO:1408 is the determined cDNA sequence for clone 63695445 R0677:G02.

[1447] SEQ ID NO:1409 is the determined cDNA sequence for clone 63695446 R0677:G03

[1448] SEQ ID NO:1410 is the determined cDNA sequence for clone 63695447 R0677:G04.

[1449] SEQ ID NO:1411 is the determined cDNA sequence for clone 63695448 R0677:G05.

[1450] SEQ ID NO:1412 is the determined cDNA sequence for clone 63695449 R0677:G06.

[1451] SEQ ID NO:1413 is the determined cDNA sequence for clone 63695450 R0677:G07.

[1452] SEQ ID NO:1414 is the determined cDNA sequence for clone 63695451 R0677:G08.

[1453] SEQ ID NO:1415 is the determined cDNA sequence for clone 63695452 R0677:G09.

[1454] SEQ ID NO:1416 is the determined cDNA sequence for clone 63695453 R0677:G10.

[1455] SEQ ID NO:1417 is the determined cDNA sequence for clone 63695454 R0677:G11.

[1456] SEQ ID NO:1418 is the determined cDNA sequence for clone 63695455 R0677:G12.

[1457] SEQ ID NO:1419 is the determined cDNA sequence for clone 63695456 R0677:H01.

[1458] SEQ ID NO:1420 is the determined cDNA sequence for clone 63695457 R0677:H02.

[1459] SEQ ID NO:1421 is the determined cDNA sequence for clone 63695458 R0677:H03.

[1460] SEQ ID NO:1422 is the determined cDNA sequence for clone 63695459 R0677:H04.

[1461] SEQ ID NO:1423 is the determined cDNA sequence for clone 63695460 R0677:H05.

[1462] SEQ ID NO:1424 is the determined cDNA sequence for clone 63695461 R0677:H06.

[1463] SEQ ID NO:1425 is the determined cDNA sequence for clone 63695462 R0677:H07.

[1464] SEQ ID NO:1426 is the determined cDNA sequence for clone 63695463 R0677:H08.

[1465] SEQ ID NO:1427 is the determined cDNA sequence for clone 63695464 R0677:H09.

[1466] SEQ ID NO:1428 is the determined cDNA sequence for clone 63695465 R0677:H10.

[1467] SEQ ID NO:1429 is the determined cDNA sequence for clone 63695466 R0677: H 11.

[1468] SEQ ID NO:1430 is the determined cDNA sequence for clone 63708283 R0678:A02.

[1469] SEQ ID NO:1431 is the determined cDNA sequence for clone 63708284 R0678:A03.

[1470] SEQ ID NO:1432 is the determined cDNA sequence for clone 63708285 R0678:A05.

[1471] SEQ ID NO:1433 is the determined cDNA sequence for clone 63708286 R0678:A06.

[1472] SEQ ID NO:1434 is the determined cDNA sequence for clone 63708287 R0678:A07.

[1473] SEQ ID NO:1435 is the determined cDNA sequence for clone 63708289 R0678:A09.

[1474] SEQ ID NO:1436 is the determined cDNA sequence for clone 63708290 R0678:A10.

[1475] SEQ ID NO:1437 is the determined cDNA sequence for clone 63708291 R0678:A 11.

[1476] SEQ ID NO:1438 is the determined cDNA sequence for clone 63708292 R0678:A12.

[1477] SEQ ID NO:1439 is the determined cDNA sequence for clone 63708293 R0678:B01.

[1478] SEQ ID NO:1440 is the determined cDNA sequence for clone 63708294 R0678:B02.

[1479] SEQ ID NO:1441 is the determined cDNA sequence for clone 63708295 R0678:B03.

[1480] SEQ ID NO:1442 is the determined cDNA sequence for clone 63708296 R0678:B04.

[1481] SEQ ID NO:1443 is the determined cDNA sequence for clone 63708297 R0678:B05.

[1482] SEQ ID NO:1444 is the determined cDNA sequence for clone 63708298 R0678:B06.

[1483] SEQ ID NO:1445 is the determined cDNA sequence for clone 63708299 R0678:B07.

[1484] SEQ ID NO:1446 is the determined cDNA sequence for clone 63708300 R0678:B08.

[1485] SEQ ID NO:1447 is the determined cDNA sequence for clone 63708302 R0678:B10.

[1486] SEQ ID NO:1448 is the determined cDNA sequence for clone 63708304 R0678:B12.

[1487] SEQ ID NO:1449 is the determined cDNA sequence for clone 63708305 R0678:C01.

[1488] SEQ ID NO:1450 is the determined cDNA sequence for clone 63708306 R0678:C02.

[1489] SEQ ID NO:1451 is the determined cDNA sequence for clone 63708307 R0678:C03.

[1490] SEQ ID NO:1452 is the determined cDNA sequence for clone 63708308 R0678:C04.

[1491] SEQ ID NO:1453 is the determined cDNA sequence for clone 63708309 R0678:C05.

[1492] SEQ ID NO:1454 is the determined cDNA sequence for clone 63708311 R0678:C07.

[1493] SEQ ID NO:1455 is the determined cDNA sequence for clone 63708313 R0678:C09.

[1494] SEQ ID NO:1456 is the determined cDNA sequence for clone 63708314 R0678:C10.

[1495] SEQ ID NO:1457 is the determined cDNA sequence for clone 63708315 R0678:C11.

[1496] SEQ ID NO:1458 is the determined cDNA sequence for clone 63708316 R0678:C12.

[1497] SEQ ID NO:1459 is the determined cDNA sequence for clone 63708317 R0678:D01.

[1498] SEQ ID NO:1460 is the determined cDNA sequence for clone 63708318 R0678:D02.

[1499] SEQ ID NO:1461 is the determined cDNA sequence for clone 63708319 R0678:D03.

[1500] SEQ ID NO:1462 is the determined cDNA sequence for clone 63708321 R0678:D05.

[1501] SEQ ID NO:1463 is the determined cDNA sequence for clone 63708322 R0678:D06.

[1502] SEQ ID NO:1464 is the determined cDNA sequence for clone 63708323 R0678:D07.

[1503] SEQ ID NO:1465 is the determined cDNA sequence for clone 63708324 R0678:D08.

[1504] SEQ ID NO:1466 is the determined cDNA sequence for clone 63708325 R0678:D09.

[1505] SEQ ID NO:1467 is the determined cDNA sequence for clone 63708326 R0678:D10.

[1506] SEQ ID NO:1468 is the determined cDNA sequence for clone 63708327 R0678:D11.

[1507] SEQ ID NO:1469 is the determined cDNA sequence for clone 63708328 R0678:D12.

[1508] SEQ ID NO:1470 is the determined cDNA sequence for clone 63708330 R0678:E02.

[1509] SEQ ID NO:1471 is the determined cDNA sequence for clone 63708331 R0678:E03.

[1510] SEQ ID NO:1472 is the determined cDNA sequence for clone 63708332 R0678:E04.

[1511] SEQ ID NO:1473 is the determined cDNA sequence for clone 63708333 R0678:E05.

[1512] SEQ ID NO:1474 is the determined cDNA sequence for clone 63708334 R0678:E06.

[1513] SEQ ID NO:1475 is the determined cDNA sequence for clone 63708335 R0678:E07.

[1514] SEQ ID NO:1476 is the determined cDNA sequence for clone 63708336 R0678:E08.

[1515] SEQ ID NO:1477 is the determined cDNA sequence for clone 63708337 R0678:E09.

[1516] SEQ ID NO:1478 is the determined cDNA sequence for clone 63708338 R0678:E10.

[1517] SEQ ID NO:1479 is the determined cDNA sequence for clone 63708339 R0678:E 1.

[1518] SEQ ID NO:1480 is the determined cDNA sequence for clone 63708340 R0678:E12.

[1519] SEQ ID NO:1481 is the determined cDNA sequence for clone 63708341 R0678:F01.

[1520] SEQ ID NO:1482 is the determined cDNA sequence for clone 63708342 R0678:F02.

[1521] SEQ ID NO:1483 is the determined cDNA sequence for clone 63708343 R0678:F03.

[1522] SEQ ID NO:1484 is the determined cDNA sequence for clone 63708344 R0678:F04.

[1523] SEQ ID NO:1485 is the determined cDNA sequence for clone 63708345 R0678:F05.

[1524] SEQ ID NO:1486 is the determined cDNA sequence for clone 63708346 R0678:F06.

[1525] SEQ ID NO:1487 is the determined cDNA sequence for clone 63708347 R0678:F07.

[1526] SEQ ID NO:1488 is the determined cDNA sequence for clone 63708348 R0678:F08.

[1527] SEQ ID NO:1489 is the determined cDNA sequence for clone 63708349 R0678:F09.

[1528] SEQ ID NO:1490 is the determined cDNA sequence for clone 63708350 R0678:F10.

[1529] SEQ ID NO:1491 is the determined cDNA sequence for clone 63708352 R0678:F12.

[1530] SEQ ID NO:1492 is the determined cDNA sequence for clone 63708354 R0678:G02.

[1531] SEQ ID NO:1493 is the determined cDNA sequence for clone 63708355 R0678:G03.

[1532] SEQ ID NO:1494 is the determined cDNA sequence for clone 63708356 R0678:G04.

[1533] SEQ ID NO:1495 is the determined cDNA sequence for clone 63708357 R0678:G05.

[1534] SEQ ID NO:1496 is the determined cDNA sequence for clone 63708358 R0678:G06.

[1535] SEQ ID NO:1497 is the determined cDNA sequence for clone 63708359 R0678:G07.

[1536] SEQ ID NO:1498 is the determined cDNA sequence for clone 63708361 R0678:G09.

[1537] SEQ ID NO:1499 is the determined cDNA sequence for clone 63708362 R0678:G10.

[1538] SEQ ID NO:1500 is the determined cDNA sequence for clone 63708363 R0678:G11.

[1539] SEQ ID NO: 1501 is the determined cDNA sequence for clone 63708365 R0678:H01.

[1540] SEQ ID NO:1502 is the determined cDNA sequence for clone 63708366 R0678:H02.

[1541] SEQ ID NO:1503 is the determined cDNA sequence for clone 63708367 R0678:H03.

[1542] SEQ ID NO:1504 is the determined cDNA sequence for clone 63708370 R0678:H06.

[1543] SEQ ID NO:1505 is the determined cDNA sequence for clone 63708371 R0678:H07.

[1544] SEQ ID NO:1506 is the determined cDNA sequence for clone 63708372 R0678:H08.

[1545] SEQ ID NO:1507 is the determined cDNA sequence for clone 63708373 R0678:H09.

[1546] SEQ ID NO:1508 is the determined cDNA sequence for clone 63708374 R0678:H10.

[1547] SEQ ID NO: 1509 is the determined cDNA sequence for clone 63708375 R0678:H11.

[1548] SEQ ID NO: 1510 is the determined cDNA sequence for clone 63695560 R0679:A02.

[1549] SEQ ID NO:1511 is the determined cDNA sequence for clone 63695561 R0679:A03.

[1550] SEQ ID NO:1512 is the determined cDNA sequence for clone 63695562 R0679:A05.

[1551] SEQ ID NO:1513 is the determined cDNA sequence for clone 63695563 R0679:A06.

[1552] SEQ ID NO:1514 is the determined cDNA sequence for clone 63695564 R0679:A07.

[1553] SEQ ID NO:1515 is the determined cDNA sequence for clone 63695565 R0679:A08.

[1554] SEQ ID NO:1516 is the determined cDNA sequence for clone 63695566 R0679:A09.

[1555] SEQ ID NO:1517 is the determined cDNA sequence for clone 63695567 R0679:A10.

[1556] SEQ ID NO:1518 is the determined cDNA sequence for clone 63695568 R0679:A11.

[1557] SEQ ID NO:1519 is the determined cDNA sequence for clone 63695569 R0679:A12.

[1558] SEQ ID NO:1520 is the determined cDNA sequence for clone 63695570 R0679:B01.

[1559] SEQ ID NO:1521 is the determined cDNA sequence for clone 63695571 R0679:B02.

[1560] SEQ ID NO:1522 is the determined cDNA sequence for clone 63695572 R0679:B03.

[1561] SEQ ID NO:1523 is the determined cDNA sequence for clone 63695573 R0679:B04.

[1562] SEQ ID NO:1524 is the determined cDNA sequence for clone 63695574 R0679:B05.

[1563] SEQ ID NO:1525 is the determined cDNA sequence for clone 63695575 R0679:B06.

[1564] SEQ ID NO:1526 is the determined cDNA sequence for clone 63695576 R0679:B07.

[1565] SEQ ID NO:1527 is the determined cDNA sequence for clone 63695577 R0679:B08.

[1566] SEQ ID NO:1528 is the determined cDNA sequence for clone 63695578 R0679:B09.

[1567] SEQ ID NO:1529 is the determined cDNA sequence for clone 63695579 R0679:B10.

[1568] SEQ ID NO:1530 is the determined cDNA sequence for clone 63695580 R0679:B11.

[1569] SEQ ID NO: 1531 is the determined cDNA sequence for clone 63695581 R0679:B12.

[1570] SEQ ID NO: 1532 is the determined cDNA sequence for clone 63695582 R0679:C01.

[1571] SEQ ID NO:1533 is the determined cDNA sequence for clone 63695583 R0679:C02.

[1572] SEQ ID NO: 1534 is the determined cDNA sequence for clone 63695586 R0679:C03.

[1573] SEQ ID NO:1535 is the determined cDNA sequence for clone 63695587 R0679:C06.

[1574] SEQ ID NO:1536 is the determined cDNA sequence for clone 63695589 R0679:C08.

[1575] SEQ ID NO:1537 is the determined cDNA sequence for clone 63695590 R0679:C09.

[1576] SEQ ID NO:1538 is the determined cDNA sequence for clone 63695591 R0679:C10.

[1577] SEQ ID NO:1539 is the determined cDNA sequence for clone 63695592 R0679:C11.

[1578] SEQ ID NO:1540 is the determined cDNA sequence for clone 63695593 R0679:C12.

[1579] SEQ ID NO:1541 is the determined cDNA sequence for clone 63695594 R0679:D01.

[1580] SEQ ID NO:1542 is the determined cDNA sequence for clone 63695595 R0679:D02.

[1581] SEQ ID NO:1543 is the determined cDNA sequence for clone 63695596 R0679:D03.

[1582] SEQ ID NO:1544 is the determined cDNA sequence for clone 63695597 R0679:D04.

[1583] SEQ ID NO:1545 is the determined cDNA sequence for clone 63695598 R0679:D05.

[1584] SEQ ID NO:1546 is the determined cDNA sequence for clone 63695599 R0679:D06.

[1585] SEQ ID NO:1547 is the determined cDNA sequence for clone 63695600 R0679:D07.

[1586] SEQ ID NO: 1548 is the determined cDNA sequence for clone 63695602 R0679:D09.

[1587] SEQ ID NO:1549 is the determined cDNA sequence for clone 63695603 R0679:D10.

[1588] SEQ ID NO:1550 is the determined cDNA sequence for clone 63695604 R0679:D11.

[1589] SEQ ID NO:1551 is the determined cDNA sequence for clone 63695605 R0679:D12.

[1590] SEQ ID NO:1552 is the determined cDNA sequence for clone 63695606 R0679:E01.

[1591] SEQ ID NO:1553 is the determined cDNA sequence for clone 63695608 R0679:E03.

[1592] SEQ ID NO:1554 is the determined cDNA sequence for clone 63695609 R0679:E04.

[1593] SEQ ID NO:1555 is the determined cDNA sequence for clone 63695610 R0679:E05.

[1594] SEQ ID NO:1556 is the determined cDNA sequence for clone 63695611 R0679:E06.

[1595] SEQ ID NO:1557 is the determined cDNA sequence for clone 63695612 R0679:E07.

[1596] SEQ ID NO:1558 is the determined cDNA sequence for clone 63695613 R0679:E08.

[1597] SEQ ID NO:1559 is the determined cDNA sequence for clone 63695614 R0679:E09.

[1598] SEQ ID NO:1560 is the determined cDNA sequence for clone 63695615 R0679:E10.

[1599] SEQ ID NO:1561 is the determined cDNA sequence for clone 63695616 R0679:E11.

[1600] SEQ ID NO:1562 is the determined cDNA sequence for clone 63695617 R0679:E12.

[1601] SEQ ID NO:1563 is the determined cDNA sequence for clone 63695618 R0679:F01.

[1602] SEQ ID NO:1564 is the determined cDNA sequence for clone 63695619 R0679:F02.

[1603] SEQ ID NO:1565 is the determined cDNA sequence for clone 63695620 R0679:F03.

[1604] SEQ ID NO:1566 is the determined cDNA sequence for clone 63695622 R0679:F05.

[1605] SEQ ID NO:1567 is the determined cDNA sequence for clone 63695623 R0679:F06.

[1606] SEQ ID NO:1568 is the determined cDNA sequence for clone 63695624 R0679:F07.

[1607] SEQ ID NO:1569 is the determined cDNA sequence for clone 63695625 R0679:F08.

[1608] SEQ ID NO:1570 is the determined cDNA sequence for clone 63695626 R0679:F09.

[1609] SEQ ID NO:1571 is the determined cDNA sequence for clone 63695627 R0679:F10.

[1610] SEQ ID NO:1572 is the determined cDNA sequence for clone 63695629 R0679:F12.

[1611] SEQ ID NO:1573 is the determined cDNA sequence for clone 63695630 R0679:G01.

[1612] SEQ ID NO:1574 is the determined cDNA sequence for clone 63695631 R0679:G02.

[1613] SEQ ID NO:1575 is the determined cDNA sequence for clone 63695633 R0679:G04.

[1614] SEQ ID NO:1576 is the determined cDNA sequence for clone 63695635 R0679:G06.

[1615] SEQ ID NO:1577 is the determined cDNA sequence for clone 63695636 R0679:G07.

[1616] SEQ ID NO:1578 is the determined cDNA sequence for clone 63695637 R0679:G08.

[1617] SEQ ID NO:1579 is the determined cDNA sequence for clone 63695640 R0679:G11.

[1618] SEQ ID NO:1580 is the determined cDNA sequence for clone 63695641 R0679:G12.

[1619] SEQ ID NO:1581 is the determined cDNA sequence for clone 63695642 R0679:H01.

[1620] SEQ ID NO:1582 is the determined cDNA sequence for clone 63695643 R0679:H02.

[1621] SEQ ID NO: 1583 is the determined cDNA sequence for clone 63695644 R0679:H03.

[1622] SEQ ID NO:1584 is the determined cDNA sequence for clone 63695645 R0679:H04.

[1623] SEQ ID NO:1585 is the determined cDNA sequence for clone 63695646 R0679:H05.

[1624] SEQ ID NO:1586 is the determined cDNA sequence for clone 63695647 R0679:H06.

[1625] SEQ ID NO:1587 is the determined cDNA sequence for clone 63695649 R0679:H08.

[1626] SEQ ID NO:1588 is the determined cDNA sequence for clone 63695650 R0679:H09.

[1627] SEQ ID NO:1589 is the determined cDNA sequence for clone 63695652 R0679:H11.

[1628] SEQ ID NO:1590 is the determined cDNA sequence for clone 63695468 R0680:A03.

[1629] SEQ ID NO:1591 is the determined cDNA sequence for clone 63695469 R0680:A05.

[1630] SEQ ID NO:1592 is the determined cDNA sequence for clone 63695470 R0680:A06.

[1631] SEQ ID NO:1593 is the determined cDNA sequence for clone 63695471 R0680:A07.

[1632] SEQ ID NO:1594 is the determined cDNA sequence for clone 63695472 R0680:A08.

[1633] SEQ ID NO:1595 is the determined cDNA sequence for clone 63695473 R0680:A09.

[1634] SEQ ID NO:1596 is the determined cDNA sequence for clone 63695474 R0680:A10.

[1635] SEQ ID NO:1597 is the determined cDNA sequence for clone 63695475 R0680:A 1.

[1636] SEQ ID NO:1598 is the determined cDNA sequence for clone 63695476 R0680:A12.

[1637] SEQ ID NO: 1599 is the determined cDNA sequence for clone 63695477 R0680:B01.

[1638] SEQ ID NO:1600 is the determined cDNA sequence for clone 63695478 R0680:B02.

[1639] SEQ ID NO:1601 is the determined cDNA sequence for clone 63695480 R0680:B04.

[1640] SEQ ID NO:1602 is the determined cDNA sequence for clone 63695482 R0680:B06.

[1641] SEQ ID NO: 1603 is the determined cDNA sequence for clone 63695483 R0680:B07.

[1642] SEQ ID NO:1604 is the determined cDNA sequence for clone 63695484 R0680:B08.

[1643] SEQ ID NO:1605 is the determined cDNA sequence for clone 63695485 R0680:B09.

[1644] SEQ ID NO:1606 is the determined cDNA sequence for clone 63695486 R0680:B10.

[1645] SEQ ID NO:1607 is the determined cDNA sequence for clone 63695487 R0680:B11.

[1646] SEQ ID NO:1608 is the determined cDNA sequence for clone 63695488 R0680:B12.

[1647] SEQ ID NO:1609 is the determined cDNA sequence for clone 63695489 R0680:C01.

[1648] SEQ ID NO:1610 is the determined cDNA sequence for clone 63695490 R0680:C02.

[1649] SEQ ID NO:1611 is the determined cDNA sequence for clone 63695491 R0680:C03.

[1650] SEQ ID NO:1612 is the determined cDNA sequence for clone 63695492 R0680:C04.

[1651] SEQ ID NO:1613 is the determined cDNA sequence for clone 63695495 R0680:C07.

[1652] SEQ ID NO:1614 is the determined cDNA sequence for clone 63695496 R0680:C08.

[1653] SEQ ID NO:1615 is the determined cDNA sequence for clone 63695497 R0680:C09.

[1654] SEQ ID NO:1616 is the determined cDNA sequence for clone 63695498 R0680:C10.

[1655] SEQ ID NO:1617 is the determined cDNA sequence for clone 63695499 R0680:C11.

[1656] SEQ ID NO:1618 is the determined cDNA sequence for clone 63695501 R0680:D01.

[1657] SEQ ID NO:1619 is the determined cDNA sequence for clone 63695502 R0680:D02.

[1658] SEQ ID NO:1620 is the determined cDNA sequence for clone 63695503 R0680:D03.

[1659] SEQ ID NO:1621 is the determined cDNA sequence for clone 63695504 R0680:D04.

[1660] SEQ ID NO:1622 is the determined cDNA sequence for clone 63695507 R0680:D07.

[1661] SEQ ID NO:1623 is the determined cDNA sequence for clone 63695509 R0680:D09.

[1662] SEQ ID NO:1624 is the determined cDNA sequence for clone 63695510 R0680:D10.

[1663] SEQ ID NO:1625 is the determined cDNA sequence for clone 63695511 R0680:D11.

[1664] SEQ ID NO:1626 is the determined cDNA sequence for clone 63695512 R0680:D12.

[1665] SEQ ID NO:1627 is the determined cDNA sequence for clone 63695513 R0680:E01.

[1666] SEQ ID NO:1628 is the determined cDNA sequence for clone 63695515 R0680:E03.

[1667] SEQ ID NO:1629 is the determined cDNA sequence for clone 63695516 R0680:E04.

[1668] SEQ ID NO:1630 is the determined cDNA sequence for clone 63695518 R0680:E06.

[1669] SEQ ID NO:1631 is the determined cDNA sequence for clone 63695519 R0680:E07.

[1670] SEQ ID NO:1632 is the determined cDNA sequence for clone 63695520 R0680:E08.

[1671] SEQ ID NO:1633 is the determined cDNA sequence for clone 63695521 R0680:E09.

[1672] SEQ ID NO:1634 is the determined cDNA sequence for clone 63695522 R0680:E10.

[1673] SEQ ID NO:1635 is the determined cDNA sequence for clone 63695523 R0680:E11.

[1674] SEQ ID NO:1636 is the determined cDNA sequence for clone 63695524 R0680:E12.

[1675] SEQ ID NO:1637 is the determined cDNA sequence for clone 63695525 R0680:F01.

[1676] SEQ ID NO:1638 is the determined cDNA sequence for clone 63695526 R0680:F02.

[1677] SEQ ID NO:1639 is the determined cDNA sequence for clone 63695527 R0680:F03.

[1678] SEQ ID NO:1640 is the determined cDNA sequence for clone 63695528 R0680:F04.

[1679] SEQ ID NO:1641 is the determined cDNA sequence for clone 63695530 R0680:F06.

[1680] SEQ ID NO:1642 is the determined cDNA sequence for clone 63695532 R0680:F08.

[1681] SEQ ID NO:1643 is the determined cDNA sequence for clone 63695534 R0680:F10.

[1682] SEQ ID NO:1644 is the determined cDNA sequence for clone 63695535 R0680:F11.

[1683] SEQ ID NO:1645 is the determined cDNA sequence for clone 63695536 R0680:F12.

[1684] SEQ ID NO:1646 is the determined cDNA sequence for clone 63695537 R0680:G01.

[1685] SEQ ID NO:1647 is the determined cDNA sequence for clone 63695538 R0680:G02.

[1686] SEQ ID NO:1648 is the determined cDNA sequence for clone 63695539 R0680:G03.

[1687] SEQ ID NO:1649 is the determined cDNA sequence for clone 63695540 R0680:G04.

[1688] SEQ ID NO:1650 is the determined cDNA sequence for clone 63695542 R0680:G06.

[1689] SEQ ID NO:1651 is the determined cDNA sequence for clone 63695544 R0680:G08.

[1690] SEQ ID NO:1652 is the determined cDNA sequence for clone 63695545 R0680:G09.

[1691] SEQ ID NO:1653 is the determined cDNA sequence for clone 63695546 R0680:G10.

[1692] SEQ ID NO:1654 is the determined cDNA sequence for clone 63695547 R0680:G11.

[1693] SEQ ID NO:1655 is the determined cDNA sequence for clone 63695549 R0680:H01.

[1694] SEQ ID NO:1656 is the determined cDNA sequence for clone 63695551 R0680:H03.

[1695] SEQ ID NO:1657 is the determined cDNA sequence for clone 63695552 R0680:H04.

[1696] SEQ ID NO:1658 is the determined cDNA sequence for clone 63695554 R0680:H06.

[1697] SEQ ID NO:1659 is the determined cDNA sequence for clone 63695556 R0680:H08.

[1698] SEQ ID NO:1660 is the determined cDNA sequence for clone 63695559 R0680: H11.

[1699] SEQ ID NO:1661 is the determined cDNA sequence for clone 673.A9.

[1700] SEQ ID NO:1662 is the determined cDNA sequence for clone 673.H12.

[1701] SEQ ID NO:1663 is the determined cDNA sequence for clone 674.A7.GI:12728304.

[1702] SEQ ID NO:1664 is the determined cDNA sequence for clone 674.A7.

[1703] SEQ ID NO:1665 is the determined cDNA sequence for clone 675.G9.GI: 12736649.

[1704] SEQ ID NO:1666 is the determined cDNA sequence for clone 675.G9.

[1705] SEQ ID NO:1667 is the determined cDNA sequence for clone 675.A11.GI:10435821.

[1706] SEQ ID NO:1668 is the determined cDNA sequence for clone 675.A11.

[1707] SEQ ID NO:1669 is the determined cDNA sequence for clone 676.F9.

[1708] SEQ ID NO:1670 is the determined cDNA sequence for clone 677.F11.

[1709] SEQ ID NO: 1671 is the determined cDNA sequence for clone 680.F1.GI:3088574.

[1710] SEQ ID NO:1672 is the determined cDNA sequence for clone 680.F1.

[1711] SEQ ID NO:1673 is the determined cDNA sequence for clone 680.H3.GI:12652924.

[1712] SEQ ID NO:1674 is the determined cDNA sequence for clone 680.H3.

[1713] SEQ ID NO:1675 is the determined cDNA sequence for clone 680.B11.

[1714] SEQ ID NO:1676 is the determined cDNA sequence for clone 685.F11.

[1715] SEQ ID NO:1677 is the determined cDNA sequence for clone 687. B3.72249.

[1716] SEQ ID NO:1678 is the determined cDNA sequence for clone 678.D2.GI:12734542.

[1717] SEQ ID NO:1679 is the determined cDNA sequence for clone 678.D2.72899.

[1718] SEQ ID NO:1680 is the determined cDNA sequence for clone 683.G3.GI:4185790.

[1719] SEQ ID NO:1681 is the determined cDNA sequence for clone 683.G3.70426.

[1720] SEQ ID NO:1682 is the determined cDNA sequence for clone 673.E12.GI:10436905.

[1721] SEQ ID NO:1683 is the determined cDNA sequence for clone 673.E12.72901.

[1722] SEQ ID NO:1684 is the determined cDNA sequence for clone 672. E3.

[1723] SEQ ID NO:1685 is the determined cDNA sequence for clone 672.E3.72233.

[1724] SEQ ID NO:1686 is the determined cDNA sequence for clone 677.C7.GI:10434626.

[1725] SEQ ID NO:1687 is the determined cDNA sequence for clone 677.C7.72240.

[1726] SEQ ID NO:1688 is the determined cDNA sequence for clone 678.E10.GI:12733361.

[1727] SEQ ID NO:1689 is the determined cDNA sequence for clone 678.E10.72242.

[1728] SEQ ID NO:1690 is the determined cDNA sequence for clone 679.C11.GI:13111934.

[1729] SEQ ID NO:1691 is the determined cDNA sequence for clone 679.C11.72243.

[1730] SEQ ID NO:1692 is the determined cDNA sequence for clone 674.D10.71575.

[1731] SEQ ID NO:1693 is the determined cDNA sequence for clone 664.B3.GI:11526264.

[1732] SEQ ID NO: 1694 is the determined cDNA sequence for clone 664.B3.71569.

[1733] SEQ ID NO:1695 is the determined cDNA sequence for clone 670.A3.71571.

[1734] SEQ ID NO:1696 is the determined cDNA sequence for clone 665.B9.GI:12737771.

[1735] SEQ ID NO:1697 is the determined cDNA sequence for clone 665.B9.70580.

[1736] SEQ ID NO:1698 is the determined cDNA sequence for clone 676G4(70581), 678H12(70582), 681B5(70586), 682E4(70589).

[1737] SEQ ID NO:1699 is the determined cDNA sequence for clone 681.F7.GI:12737278.

[1738] SEQ ID NO:1700 is the determined cDNA sequence for clone 681.F7.70587.

[1739] SEQ ID NO:1701 is the determined cDNA sequence for clone 681.H11.GI:12655152.

[1740] SEQ ID NO:1702 is the determined cDNA sequence for clone 681.H11.70584.

[1741] SEQ ID NO:1703 is the determined cDNA sequence for clone 681.H3.GI:11427606.

[1742] SEQ ID NO:1704 is the determined cDNA sequence for clone 681.H3.70588.

[1743] SEQ ID NO:1705 is the determined cDNA sequence for clone ‘70984.1’.

[1744] SEQ ID NO:1706 is the determined cDNA sequence for clone ‘70985.1’.

[1745] SEQ ID NO:1707 is the determined cDNA sequence for clone ‘70990.1’.

[1746] SEQ ID NO:1708 is the determined cDNA sequence for clone ‘70991.1’.

[1747] SEQ ID NO:1709 is the determined cDNA sequence for clone 4.contig.GI:11427276.

[1748] SEQ ID NO:1710 is the determined cDNA sequence for clone ‘71023.1’.

[1749] SEQ ID NO:1711 is the determined cDNA sequence for clone 5.contig.GI:11422221.

[1750] SEQ ID NO:1712 is the determined cDNA sequence for clone ‘71016.1’.

[1751] SEQ ID NO:1713 is the determined cDNA sequence for clone ‘71003.1’.

[1752] SEQ ID NO:1714 is the determined cDNA sequence for clone 7.contig.GI:6330128.

[1753] SEQ ID NO:1715 is the determined cDNA sequence for clone ‘71043.1’.

[1754] SEQ ID NO:1716 is the determined cDNA sequence for clone 8.contig.GI:11526264.

[1755] SEQ ID NO:1717 is the determined cDNA sequence for clone ‘71000.1’.

[1756] SEQ ID NO:1718 is the determined cDNA sequence for clone ‘71033.1’.

[1757] SEQ ID NO:1719 is the determined cDNA sequence for clone 9.contig.GI:7657545.

[1758] SEQ ID NO:1720 is the determined cDNA sequence for clone ‘70989.1’.

[1759] SEQ ID NO:1721 is the determined cDNA sequence for clone 10.contig.GI:482908.

[1760] SEQ ID NO:1722 is the determined cDNA sequence for clone ‘71040.1’.

[1761] SEQ ID NO:1723 is the determined cDNA sequence for clone ‘71035.1’.

[1762] SEQ ID NO:1724 is the determined cDNA sequence for clone ‘71038.1’.

[1763] SEQ ID NO:1725 is the determined cDNA sequence for clone ‘71007.1’.

[1764] SEQ ID NO:1726 is the determined cDNA sequence for clone ‘71047.1’.

[1765] SEQ ID NO:1727 is the determined cDNA sequence for clone 14.contig.GI:4096861.

[1766] SEQ ID NO:1728 is the determined cDNA sequence for clone ‘71013.1’.

[1767] SEQ ID NO:1729 is the determined cDNA sequence for clone ‘70983.1’.

[1768] SEQ ID NO:1730 is the determined cDNA sequence for clone ‘71027.1’.

[1769] SEQ ID NO:1731 is the determined cDNA sequence for clone 16.Contig.GI:11419857.

[1770] SEQ ID NO:1732 is the determined cDNA sequence for clone ‘71054.1’.

[1771] SEQ ID NO:1733 is the determined cDNA sequence for clone ‘71041.1’.

[1772] SEQ ID NO:1734 is the determined cDNA sequence for clone ‘71031.1’.

[1773] SEQ ID NO:1735 is the determined cDNA sequence for clone ‘71034.1’.

[1774] SEQ ID NO:1736 is the determined cDNA sequence for clone ‘71019.1’.

[1775] SEQ ID NO:1737 is the determined cDNA sequence for clone ‘71050.1’.

[1776] SEQ ID NO:1738 is the determined cDNA sequence for clone 23.contig.GI:4502778.

[1777] SEQ ID NO:1739 is the determined cDNA sequence for clone ‘71010.1’.

[1778] SEQ ID NO:1740 is the determined cDNA sequence for clone 24.Contig.GI:6005991.

[1779] SEQ ID NO:1741 is the determined cDNA sequence for clone ‘71044.1’.

[1780] SEQ ID NO:1742 is the determined cDNA sequence for clone ‘70996.1’.

[1781] SEQ ID NO:1743 is the determined cDNA sequence for clone 26.Contig.GI:177801.

[1782] SEQ ID NO:1744 is the determined cDNA sequence for clone ‘71060.1’.

[1783] SEQ ID NO:1745 is the determined cDNA sequence for clone 27.Contig.GI:10439726.

[1784] SEQ ID NO:1746 is the determined cDNA sequence for clone ‘71057.1’.

[1785] SEQ ID NO:1747 is the determined cDNA sequence for clone ‘71001.1’.

[1786] SEQ ID NO:1748 is the determined cDNA sequence for clone 29.contig.gbID.11429588.

[1787] SEQ ID NO:1749 is the determined cDNA sequence for clone ‘70971.1’.

[1788] SEQ ID NO:1750 is the determined cDNA sequence for clone ‘70973.1’.

[1789] SEQ ID NO:1751 is the determined cDNA sequence for clone ‘70974.1’.

[1790] SEQ ID NO:1752 is the determined cDNA sequence for clone ‘70975.1’.

[1791] SEQ ID NO:1753 is the determined cDNA sequence for clone ‘70977.1’.

[1792] SEQ ID NO:1754 is the determined cDNA sequence for clone ‘70980.1’.

[1793] SEQ ID NO:1755 is the determined cDNA sequence for clone ‘70981.1’.

[1794] SEQ ID NO:1756 is the determined cDNA sequence for clone ‘70982.1’.

[1795] SEQ ID NO:1757 is the determined cDNA sequence for clone ‘70986.1’.

[1796] SEQ ID NO:1758 is the determined cDNA sequence for clone ‘70987.1’.

[1797] SEQ ID NO:1759 is the determined cDNA sequence for clone ‘70988.1’.

[1798] SEQ ID NO:1760 is the determined cDNA sequence for clone ‘70997.1’.

[1799] SEQ ID NO:1761 is the determined cDNA sequence for clone ‘70998.1’.

[1800] SEQ ID NO:1762 is the determined cDNA sequence for clone ‘70999.1’.

[1801] SEQ ID NO:1763 is the determined cDNA sequence for clone ‘71006.1’.

[1802] SEQ ID NO:1764 is the determined cDNA sequence for clone ‘71008.1’.

[1803] SEQ ID NO:1765 is the determined cDNA sequence for clone ‘71009.1’.

[1804] SEQ ID NO:1766 is the determined cDNA sequence for clone ‘71011.1’.

[1805] SEQ ID NO:1767 is the determined cDNA sequence for clone ‘71012.1’.

[1806] SEQ ID NO:1768 is the determined cDNA sequence for clone ‘71018.1’.

[1807] SEQ ID NO:1769 is the determined cDNA sequence for clone ‘71021.1’.

[1808] SEQ ID NO:1770 is the determined cDNA sequence for clone ‘71022.1’.

[1809] SEQ ID NO:1771 is the determined cDNA sequence for clone ‘71024.1’.

[1810] SEQ ID NO:1772 is the determined cDNA sequence for clone ‘71028.1’.

[1811] SEQ ID NO:1773 is the determined cDNA sequence for clone ‘71029.1’.

[1812] SEQ ID NO:1774 is the determined cDNA sequence for clone ‘71032.1’.

[1813] SEQ ID NO:1775 is the determined cDNA sequence for clone ‘71036.1’.

[1814] SEQ ID NO:1776 is the determined cDNA sequence for clone ‘71037.1’.

[1815] SEQ ID NO:1777 is the determined cDNA sequence for clone ‘71039.1’.

[1816] SEQ ID NO:1778 is the determined cDNA sequence for clone ‘71045.1’.

[1817] SEQ ID NO:1779 is the determined cDNA sequence for clone ‘71049.1’.

[1818] SEQ ID NO:1780 is the determined cDNA sequence for clone ‘71051.1’.

[1819] SEQ ID NO:1781 is the determined cDNA sequence for clone ‘71055.1’.

[1820] SEQ ID NO:1782 is the determined cDNA sequence for clone ‘71058.1’.

[1821] SEQ ID NO:1783 is the determined cDNA sequence for clone ‘71059.1’.

[1822] SEQ ID NO:1784 is the determined cDNA sequence for clone ‘71062.1’.

[1823] SEQ ID NO:1785 is the determined cDNA sequence for clone ‘71063.1’.

[1824] SEQ ID NO:1786 is the determined cDNA sequence for clone ‘71065.1’.

[1825] SEQ ID NO:1787 is the determined cDNA sequence for clone ‘71066.1’.

[1826] SEQ ID NO:1788 is the determined cDNA sequence for clone 602287 Human E1A enhancer binding protein (EIA-F).

[1827] SEQ ID NOs:1789 is both the predicted amino acid sequence for SEQ ID NO:1788, Human E1A enhancer binding protein (EIA-F).

[1828] SEQ ID NO:1790 is the determined cDNA sequence for clone 74798.

[1829] SEQ ID NO:1791 is the determined cDNA sequence for clone 74799.

[1830] SEQ ID NO:1792 is the determined cDNA sequence for clone 74803.

[1831] SEQ ID NO:1793 is the determined cDNA sequence for clone 74804.

[1832] SEQ ID NO:1794 is the determined cDNA sequence for clone 74806.

[1833] SEQ ID NO:1795 is the determined cDNA sequence for clone 74807.

[1834] SEQ ID NO:1796 is the determined cDNA sequence for clone 74809.

[1835] SEQ ID NO:1797 is the determined cDNA sequence for clone 74811.

[1836] SEQ ID NO:1798 is the determined cDNA sequence for clone 74812.

[1837] SEQ ID NO:1799 is the determined cDNA sequence for clone 74813.

[1838] SEQ ID NO:1800 is the determined cDNA sequence for clone 74814.

[1839] SEQ ID NO:1801 is the determined cDNA sequence for clone 74815.

[1840] SEQ ID NO:1802 is the determined cDNA sequence for clone 74816.

[1841] SEQ ID NO:1803 is the determined cDNA sequence for clone 74821.

[1842] SEQ ID NO:1804 is the determined cDNA sequence for clone 74823.

[1843] SEQ ID NO:1805 is the determined cDNA sequence for clone 74824.

[1844] SEQ ID NO:1806 is the determined cDNA sequence for clone 74827.

[1845] SEQ ID NO:1807 is the determined cDNA sequence for clone 74828.

[1846] SEQ ID NO:1808 is the determined cDNA sequence for clone 74829.

[1847] SEQ ID NO:1809 is the determined cDNA sequence for clone 74833.

[1848] SEQ ID NO:1810 is the determined cDNA sequence for clone 74835.

[1849] SEQ ID NO:1811 is the determined cDNA sequence for clone 74841.

[1850] SEQ ID NO:1812 is the determined cDNA sequence for clone 74844.

[1851] SEQ ID NO:1813 is the determined cDNA sequence for clone 74846.

[1852] SEQ ID NO:1814 is the determined cDNA sequence for clone 74848.

[1853] SEQ ID NO:1815 is the determined cDNA sequence for clone 74849.

[1854] SEQ ID NO:1816 is the determined cDNA sequence for clone 74850.

[1855] SEQ ID NO:1817 is the determined cDNA sequence for clone 74851.

[1856] SEQ ID NO:1818 is the determined cDNA sequence for clone 74852.

[1857] SEQ ID NO:1819 is the determined cDNA sequence for clone 74854.

[1858] SEQ ID NO:1820 is the determined cDNA sequence for clone 74856.

[1859] SEQ ID NO:1821 is the determined cDNA sequence for clone 74857.

[1860] SEQ ID NO:1822 is the determined cDNA sequence for clone 74858.

[1861] SEQ ID NO:1823 is the determined cDNA sequence for clone 74859.

[1862] SEQ ID NO:1824 is the determined cDNA sequence for clone 74861.

[1863] SEQ ID NO:1825 is the determined cDNA sequence for clone 74862.

[1864] SEQ ID NO:1826 is the determined cDNA sequence for clone 74863.

[1865] SEQ ID NO:1827 is the determined cDNA sequence for clone 74864.

[1866] SEQ ID NO:1828 is the determined cDNA sequence for clone 74865.

[1867] SEQ ID NO:1829 is the determined cDNA sequence for clone 74868.

[1868] SEQ ID NO:1830 is the determined cDNA sequence for clone 74869.

[1869] SEQ ID NO:1831 is the determined cDNA sequence for clone 74870.

[1870] SEQ ID NO:1832 is the determined cDNA sequence for clone 74871.

[1871] SEQ ID NO:1833 is the determined cDNA sequence for clone 74873.

[1872] SEQ ID NO:1834 is the determined cDNA sequence for clone 74878.

[1873] SEQ ID NO:1835 is the determined cDNA sequence for clone 74879.

[1874] SEQ ID NO:1836 is the determined cDNA sequence for clone 74883.

[1875] SEQ ID NO:1837 is the determined cDNA sequence for clone 74884.

[1876] SEQ ID NO:1838 is the determined cDNA sequence for clone 74885.

[1877] SEQ ID NO:1839 is the determined cDNA sequence for clone 74887.

[1878] SEQ ID NO:1840 is the determined cDNA sequence for clone 74889.

[1879] SEQ ID NO:1841 is the determined cDNA sequence for clone 74890.

[1880] SEQ ID NO:1842 is the determined cDNA sequence for clone 74892.

[1881] SEQ ID NO: 1843 is the determined cDNA sequence for clone 74893.

[1882] SEQ ID NO: 1844 is the determined cDNA sequence for clone 74704.

[1883] SEQ ID NO:1845 is the determined cDNA sequence for clone 74705.

[1884] SEQ ID NO: 1846 is the determined cDNA sequence for clone 74708.

[1885] SEQ ID NO:1847 is the determined cDNA sequence for clone 74710.

[1886] SEQ ID NO:1848 is the determined cDNA sequence for clone 74718.

[1887] SEQ ID NO:1849 is the determined cDNA sequence for clone 74724.

[1888] SEQ ID NO:1850 is the determined cDNA sequence for clone 74727.

[1889] SEQ ID NO:1851 is the determined cDNA sequence for clone 74728.

[1890] SEQ ID NO:1852 is the determined cDNA sequence for clone 74729.

[1891] SEQ ID NO:1853 is the determined cDNA sequence for clone 74730.

[1892] SEQ ID NO:1854 is the determined cDNA sequence for clone 74732.

[1893] SEQ ID NO:1855 is the determined cDNA sequence for clone 74733.

[1894] SEQ ID NO:1856 is the determined cDNA sequence for clone 74735.

[1895] SEQ ID NO:1857 is the determined cDNA sequence for clone 74736.

[1896] SEQ ID NO:1858 is the determined cDNA sequence for clone 74737.

[1897] SEQ ID NO:1859 is the determined cDNA sequence for clone 74739.

[1898] SEQ ID NO:1860 is the determined cDNA sequence for clone 74742.

[1899] SEQ ID NO:1861 is the determined cDNA sequence for clone 74744.

[1900] SEQ ID NO:1862 is the determined cDNA sequence for clone 74746.

[1901] SEQ ID NO:1863 is the determined cDNA sequence for clone 74748.

[1902] SEQ ID NO:1864 is the determined cDNA sequence for clone 74749.

[1903] SEQ ID NO:1865 is the determined cDNA sequence for clone 74750.

[1904] SEQ ID NO:1866 is the determined cDNA sequence for clone 74751.

[1905] SEQ ID NO:1867 is the determined cDNA sequence for clone 74755.

[1906] SEQ ID NO:1868 is the determined cDNA sequence for clone 74756.

[1907] SEQ ID NO:1869 is the determined cDNA sequence for clone 74757.

[1908] SEQ ID NO:1870 is the determined cDNA sequence for clone 74760.

[1909] SEQ ID NO:1871 is the determined cDNA sequence for clone 74761.

[1910] SEQ ID NO:1872 is the determined cDNA sequence for clone 74763.

[1911] SEQ ID NO:1873 is the determined cDNA sequence for clone 74766.

[1912] SEQ ID NO:1874 is the determined cDNA sequence for clone 74767.

[1913] SEQ ID NO:1875 is the determined cDNA sequence for clone 74768.

[1914] SEQ ID NO:1876 is the determined cDNA sequence for clone 74769.

[1915] SEQ ID NO:1877 is the determined cDNA sequence for clone 74776.

[1916] SEQ ID NO:1878 is the determined cDNA sequence for clone 74772.

[1917] SEQ ID NO:1879 is the determined cDNA sequence for clone 74774.

[1918] SEQ ID NO:1880 is the determined cDNA sequence for clone 74776.

[1919] SEQ ID NO:1881 is the determined cDNA sequence for clone 74777.

[1920] SEQ ID NO:1882 is the determined cDNA sequence for clone 74778.

[1921] SEQ ID NO:1883 is the determined cDNA sequence for clone 74779.

[1922] SEQ ID NO:1884 is the determined cDNA sequence for clone 74783.

[1923] SEQ ID NO:1885 is the determined cDNA sequence for clone 74784.

[1924] SEQ ID NO:1886 is the determined cDNA sequence for clone 74785.

[1925] SEQ ID NO:1887 is the determined cDNA sequence for clone 74786.

[1926] SEQ ID NO:1888 is the determined cDNA sequence for clone 74787.

[1927] SEQ ID NO:1889 is the determined cDNA sequence for clone 74788.

[1928] SEQ ID NO:1890 is the determined cDNA sequence for clone 74789.

[1929] SEQ ID NO: 1891 is the determined cDNA sequence for clone 74790. 15 SEQ ID NO:1892 is the determined cDNA sequence for clone 74791.

[1930] SEQ ID NO:1893 is the determined cDNA sequence for clone 74794.

[1931] SEQ ID NO:1894 is the determined cDNA sequence for clone 74795.

[1932] SEQ ID NO:1895 is the determined cDNA sequence for clone 74796.

[1933] SEQ ID NO:1896 is the determined cDNA sequence for clone 74797.

[1934] SEQ ID NO:1897 is the determined cDNA sequence for clone 96288.1.

[1935] SEQ ID NO:1898 is the determined cDNA sequence for clone 96288.2.

[1936] SEQ ID NO:1899 is the determined cDNA sequence for clone 96291.2.

[1937] SEQ ID NO:1900 is the determined cDNA sequence for clone 96259.2.

[1938] SEQ ID NO:1901 is the determined cDNA sequence for clone 96265.2.

[1939] SEQ ID NO:1902 is the determined cDNA sequence for clone 96273.2.

[1940] SEQ ID NO:1903 is the determined cDNA sequence for clone 96273.1.

[1941] SEQ ID NO:1904 is the determined cDNA sequence for clone 96259.1.

[1942] SEQ ID NO:1905 is the determined cDNA sequence for clone 96255.1.

[1943] SEQ ID NO:1906 is the determined cDNA sequence for clone 96255.2.

[1944] SEQ ID NO:1907 is the determined cDNA sequence for clone 96270.2.

[1945] SEQ ID NO:1908 is the determined cDNA sequence for clone 96270.1.

[1946] SEQ ID NO:1909 is the determined cDNA sequence for clone 96290.2.

[1947] SEQ ID NO:1910 is the determined cDNA sequence for clone 96281.2.

[1948] SEQ ID NO:1911 is the determined cDNA sequence for clone 96274.2.

[1949] SEQ ID NO:1912 is the determined cDNA sequence for clone 96287.2.

[1950] SEQ ID NO:1913 is the determined cDNA sequence for clone 96286.1.

[1951] SEQ ID NO:1914 is the determined cDNA sequence for clone 96262.1.

[1952] SEQ ID NO:1915 is the determined cDNA sequence for clone 96278.2.

[1953] SEQ ID NO:1916 is the determined cDNA sequence for clone 96260.1.

[1954] SEQ ID NO:1917 is the determined cDNA sequence for clone 96289.2.

[1955] SEQ ID NO:1918 is the determined cDNA sequence for clone 96263.2.

[1956] SEQ ID NO:1919 is the determined cDNA sequence for clone 96263.1.

[1957] SEQ ID NO:1920 is the determined cDNA sequence for clone 96257.2.

[1958] SEQ ID NO:1921 is the determined cDNA sequence for clone 96257.1.

[1959] SEQ ID NO:1922 is the determined cDNA sequence for clone 96271.2.

[1960] SEQ ID NO:1923 is the determined cDNA sequence for clone 96267.2.

[1961] SEQ ID NO:1924 is the determined cDNA sequence for clone 96258.1.

[1962] SEQ ID NO:1925 is the determined cDNA sequence for clone 96268.2.

[1963] SEQ ID NO:1926 is the determined cDNA sequence for clone 96283.1.

[1964] SEQ ID NO:1927 is the determined cDNA sequence for clone 96261.1.

[1965] SEQ ID NO:1928 is the determined cDNA sequence for clone 95022.1.

[1966] SEQ ID NO:1929 is the determined cDNA sequence for clone 95047.1.

[1967] SEQ ID NO:1930 is the determined cDNA sequence for clone 95053.1.

[1968] SEQ ID NO:1931 is the determined cDNA sequence for clone 95054.1.

[1969] SEQ ID NO:1932 is the determined cDNA sequence for clone 95060.1.

[1970] SEQ ID NO:1933 is the determined cDNA sequence for clone 95063.1.

[1971] SEQ ID NO:1934 is the determined cDNA sequence for clone 95092.1.

[1972] SEQ ID NO: 1935 is the determined cDNA sequence for clone 95098.1.

[1973] SEQ ID NO:1936 is the determined cDNA sequence for clone 95105.1.

[1974] SEQ ID NO:1937 is the determined cDNA sequence for clone 95112.1.

[1975] SEQ ID NO:1938 is the determined cDNA sequence for clone 95120.1.

[1976] SEQ ID NO:1939 is the determined cDNA sequence for clone 95152.1.

[1977] SEQ ID NO:1940 is the determined cDNA sequence for clone 95153.1.

[1978] SEQ ID NO:1941 is the determined cDNA sequence for clone 95162.1.

[1979] SEQ ID NO:1942 is the determined cDNA sequence for clone 95163.1.

[1980] SEQ ID NO:1943 is the determined cDNA sequence for clone 95164.1.

[1981] SEQ ID NO:1944 is the determined cDNA sequence for clone 95169.1.

[1982] SEQ ID NO:1945 is the determined cDNA sequence for clone 95192.1.

[1983] SEQ ID NO:1946 is the determined cDNA sequence for clone 95212.1.

[1984] SEQ ID NO:1947 is the determined cDNA sequence for clone 96326.1.

[1985] SEQ ID NO:1948 is the determined cDNA sequence for clone 95220.1.

[1986] SEQ ID NO:1949 is the determined cDNA sequence for clone 95234.1.

[1987] SEQ ID NO:1950 is the determined cDNA sequence for clone 95239.1.

[1988] SEQ ID NO:1951 is the determined cDNA sequence for clone 95242.1.

[1989] SEQ ID NO:1952 is the determined cDNA sequence for clone 95243.1.

[1990] SEQ ID NO:1953 is the determined cDNA sequence for clone 95246.1.

[1991] SEQ ID NO:1954 is the determined cDNA sequence for clone 95256.1.

[1992] SEQ ID NO:1955 is the determined cDNA sequence for clone 96331.1.

[1993] SEQ ID NO:1956 is the determined cDNA sequence for clone 95266.1.

[1994] SEQ ID NO:1957 is the determined cDNA sequence for clone 95273.1.

[1995] SEQ ID NO:1958 is the determined cDNA sequence for clone 95274.1.

[1996] SEQ ID NO:1959 is the determined cDNA sequence for clone 95297.1.

[1997] SEQ ID NO:1960 is the determined cDNA sequence for clone 95299.1.

[1998] SEQ ID NO:1961 is the determined cDNA sequence for clone 95308.1.

[1999] SEQ ID NO:1962 is the determined cDNA sequence for clone 95309.1.

[2000] SEQ ID NO: 1963 is the determined cDNA sequence for clone 95313.1.

[2001] SEQ ID NO:1964 is the determined cDNA sequence for clone 95322.1.

[2002] SEQ ID NO:1965 is the determined cDNA sequence for clone 95324.1.

[2003] SEQ ID NO:1966 is the determined cDNA sequence for clone 95335.1.

[2004] SEQ ID NO:1967 is the determined cDNA sequence for clone 95338.1.

[2005] SEQ ID NO:1968 is the determined cDNA sequence for clone 96338.1.

[2006] SEQ ID NO:1969 is the determined cDNA sequence for clone 95340.1.

[2007] SEQ ID NO:1970 is the determined cDNA sequence for clone 95355.1.

[2008] SEQ ID NO:1971 is the determined cDNA sequence for clone 95361.1.

[2009] SEQ ID NO:1972 is the determined cDNA sequence for clone 95365.1.

[2010] SEQ ID NO:1973 is the determined cDNA sequence for clone 95370.1.

[2011] SEQ ID NO:1974 is the determined cDNA sequence for C1777P.

[2012] SEQ ID NO:1975 is the determined cDNA sequence for C1778P.

[2013] SEQ ID NO:1976 is the determined cDNA sequence for C1779P.

[2014] SEQ ID NO:1977 is the determined cDNA sequence for clone 99089.

[2015] SEQ ID NO:1978 is the determined cDNA sequence for clone 1187:F198888.

[2016] SEQ ID NO:1979 is the determined cDNA sequence for clone 1187:F1 BC016592.

[2017] SEQ ID NO:1980 is the determined cDNA sequence for clone 1221 G599074.

[2018] SEQ ID NO:1981 is the determined cDNA sequence for clone 1221 G5 GSK EST clone C7768.

[2019] SEQ ID NO:1982 is the predicted amino acid sequence for C1777P, encoded by the cDNA sequence set forth in SEQ ID NO:1974.

### DETAILED DESCRIPTION OF THE INVENTION

[2020] U.S. patents, U.S. patent application publications, U.S. patent applications, foreign patents, foreign patent applications and non-patent publications referred to in this specification and/or listed in the Application Data Sheet, are incorporated herein by reference, in their entirety.

[2021] The present invention is directed generally to compositions and their use in the therapy and diagnosis of cancer, particularly colon cancer. As described further below, illustrative compositions of the present invention include, but are not restricted to, polypeptides, particularly immunogenic polypeptides, polynucleotides encoding such polypeptides, antibodies and other binding agents, antigen presenting cells (APCs) and immune system cells (e.g., T cells).

[2022] The practice of the present invention will employ, unless indicated specifically to the contrary, conventional methods of virology, immunology, microbiology, molecular biology and recombinant DNA techniques within the skill of the art, many of which are described below for the purpose of illustration. Such techniques are explained fully in the literature. See, e.g., Sambrook, et al. Molecular Cloning: A Laboratory Manual (2nd Edition, 1989); Maniatis et al. Molecular Cloning: A Laboratory Manual (1982); DNA Cloning: A Practical Approach, vol. I & II (D. Glover, ed.); Oligonucleotide Synthesis (N. Gait, ed., 1984); Nucleic Acid Hybridization (B. Hames & S. Higgins, eds., 1985); Transcription and Translation (B. Hames & S. Higgins, eds., 1984); Animal Cell Culture (R. Freshney, ed., 1986); Perbal, A Practical Guide to Molecular Cloning (1984).

[2023] All publications, patents and patent applications cited herein, whether supra or infra, are hereby incorporated by reference in their entirety.

[2024] As used in this specification and the appended claims, the singular forms “a,” “an” and “the” include plural references unless the content clearly dictates otherwise.

[2025] Polypeptide Compositions

[2026] As used herein, the term “polypeptide” is used in its conventional meaning, i.e., as a sequence of amino acids. The polypeptides are not limited to a specific length of the product; thus, peptides, oligopeptides, and proteins are included within the definition of polypeptide, and such terms may be used interchangeably herein unless specifically indicated otherwise. This term also does not refer to or exclude post-expression modifications of the polypeptide, for example, glycosylations, acetylations, phosphorylations and the like, as well as other modifications known in the art, both naturally occurring and non-naturally occurring. A polypeptide may be an entire protein, or a subsequence thereof. Particular polypeptides of interest in the context of this invention are amino acid subsequences comprising epitopes, i.e., antigenic determinants substantially responsible for the immunogenic properties of a polypeptide and being capable of evoking an immune response.

[2027] Particularly illustrative polypeptides of the present invention comprise those encoded by a polynucleotide sequence set forth in any one of SEQ ID NOs:1-1788 and 1790-1981, or a sequence that hybridizes under moderately stringent conditions, or, alternatively, under highly stringent conditions, to a polynucleotide sequence set forth in any one of SEQ ID NOs:1-1788 and 1790-1981. Certain other illustrative polypeptides of the invention comprise amino acid sequences as set forth in any one of SEQ ID NOs:1789 and 1982.

[2028] The polypeptides of the present invention are sometimes herein referred to as colon tumor proteins or colon tumor polypeptides, as an indication that their identification has been based at least in part upon their increased levels of expression in colon tumor samples. Thus, a “colon tumor polypeptide” or “colon tumor protein,” refers generally to a polypeptide sequence of the present invention, or a polynucleotide sequence encoding such a polypeptide, that is expressed in a substantial proportion of colon tumor samples, for example preferably greater than about 20%, more preferably greater than about 30%, and most preferably greater than about 50% or more of colon tumor samples tested, at a level that is at least two fold, and preferably at least five fold, greater than the level of expression in normal tissues, as determined using a representative assay provided herein. A colon tumor polypeptide sequence of the invention, based upon its increased level of expression in tumor cells, has particular utility both as a diagnostic marker as well as a therapeutic target, as further described below.

[2029] In certain preferred embodiments, the polypeptides of the invention are immunogenic, i.e., they react detectably within an immunoassay (such as an ELISA or T-cell stimulation assay) with antisera and/or T-cells from a patient with colon cancer. Screening for immunogenic activity can be performed using techniques well known to the skilled artisan. For example, such screens can be performed using methods such as those described in Harlow and Lane, Antibodies: A Laboratory Manual, Cold Spring Harbor Laboratory, 1988. In one illustrative example, a polypeptide may be immobilized on a solid support and contacted with patient sera to allow binding of antibodies within the sera to the immobilized polypeptide. Unbound sera may then be removed and bound antibodies detected using, for example, ¹²⁵1-labeled Protein A.

[2030] As would be recognized by the skilled artisan, immunogenic portions of the polypeptides disclosed herein are also encompassed by the present invention. An “immunogenic portion,” as used herein, is a fragment of an immunogenic polypeptide of the invention that itself is immunologically reactive (i.e., specifically binds) with the B-cells and/or T-cell surface antigen receptors that recognize the polypeptide. Immunogenic portions may generally be identified using well known techniques, such as those summarized in Paul, Fundamental Immunology, 3rd ed., 243-247 (Raven Press, 1993) and references cited therein. Such techniques include screening polypeptides for the ability to react with antigen-specific antibodies, antisera and/or T-cell lines or clones. As used herein, antisera and antibodies are “antigen-specific” if they specifically bind to an antigen (i.e., they react with the protein in an ELISA or other immunoassay, and do not react detectably with unrelated proteins). Such antisera and antibodies may be prepared as described herein, and using well-known techniques.

[2031] In one preferred embodiment, an immunogenic portion of a polypeptide of the present invention is a portion that reacts with antisera and/or T-cells at a level that is not substantially less than the reactivity of the full-length polypeptide (e.g., in an ELISA and/or T-cell reactivity assay). Preferably, the level of immunogenic activity of the immunogenic portion is at least about 50%, preferably at least about 70% and most preferably greater than about 90% of the immunogenicity for the full-length polypeptide. In some instances, preferred immunogenic portions will be identified that have a level of immunogenic activity greater than that of the corresponding full-length polypeptide, e.g., having greater than about 100% or 150% or more immunogenic activity.

[2032] In certain other embodiments, illustrative immunogenic portions may include peptides in which an N-terminal leader sequence and/or transmembrane domain have been deleted. Other illustrative immunogenic portions will contain a small N- and/or C-terminal deletion (e.g., 1-30 amino acids, preferably 5-15 amino acids), relative to the mature protein.

[2033] In another embodiment, a polypeptide composition of the invention may also comprise one or more polypeptides that are immunologically reactive with T cells and/or antibodies generated against a polypeptide of the invention, particularly a polypeptide having an amino acid sequence disclosed herein, or to an immunogenic fragment or variant thereof.

[2034] In another embodiment of the invention, polypeptides are provided that comprise one or more polypeptides that are capable of eliciting T cells and/or antibodies that are immunologically reactive with one or more polypeptides described herein, or one or more polypeptides encoded by contiguous nucleic acid sequences contained in the polynucleotide sequences disclosed herein, or immunogenic fragments or variants thereof, or to one or more nucleic acid sequences which hybridize to one or more of these sequences under conditions of moderate to high stringency.

[2035] The present invention, in another aspect, provides polypeptide fragments comprising at least about 5, 10, 15, 20, 25, 50, or 100 contiguous amino acids, or more, including all intermediate lengths, of a polypeptide compositions set forth herein, such as those set forth in SEQ ID NOs:1789 and 1982, or those encoded by a polynucleotide sequence set forth in a sequence of SEQ ID NOs:1-1788 and 1790-1981.

[2036] In another aspect, the present invention provides variants of the polypeptide compositions described herein. Polypeptide variants generally encompassed by the present invention will typically exhibit at least about 70%, 75%, 80%, 85%, 90%, 91%, 92%, 93%, 94%, 95%, 96%, 97%, 98%, or 99% or more identity (determined as described below), along its length, to a polypeptide sequences set forth herein.

[2037] In one preferred embodiment, the polypeptide fragments and variants provided by the present invention are immunologically reactive with an antibody and/or T-cell that reacts with a full-length polypeptide specifically set forth herein.

[2038] In another preferred embodiment, the polypeptide fragments and variants provided by the present invention exhibit a level of immunogenic activity of at least about 50%, preferably at least about 70%, and most preferably at least about 90% or more of that exhibited by a full-length polypeptide sequence specifically set forth herein.

[2039] A polypeptide “variant,” as the term is used herein, is a polypeptide that typically differs from a polypeptide specifically disclosed herein in one or more substitutions, deletions, additions and/or insertions. Such variants may be naturally occurring or may be synthetically generated, for example, by modifying one or more of the above polypeptide sequences of the invention and evaluating their immunogenic activity as described herein and/or using any of a number of techniques well known in the art.

[2040] For example, certain illustrative variants of the polypeptides of the invention include those in which one or more portions, such as an N-terminal leader sequence or transmembrane domain, have been removed. Other illustrative variants include variants in which a small portion (e.g., 1-30 amino acids, preferably 5-15 amino acids) has been removed from the N- and/or C-terminal of the mature protein.

[2041] In many instances, a variant will contain conservative substitutions. A “conservative substitution” is one in which an amino acid is substituted for another amino acid that has similar properties, such that one skilled in the art of peptide chemistry would expect the secondary structure and hydropathic nature of the polypeptide to be substantially unchanged. As described above, modifications may be made in the structure of the polynucleotides and polypeptides of the present invention and still obtain a functional molecule that encodes a variant or derivative polypeptide with desirable characteristics, e.g., with immunogenic characteristics. When it is desired to alter the amino acid sequence of a polypeptide to create an equivalent, or even an improved, immunogenic variant or portion of a polypeptide of the invention, one skilled in the art will typically change one or more of the codons of the encoding DNA sequence according to Table 1.

[2042] For example, certain amino acids may be substituted for other amino acids in a protein structure without appreciable loss of interactive binding capacity with structures such as, for example, antigen-binding regions of antibodies or binding sites on substrate molecules. Since it is the interactive capacity and nature of a protein that defines that protein's biological functional activity, certain amino acid sequence substitutions can be made in a protein sequence, and, of course, its underlying DNA coding sequence, and nevertheless obtain a protein with like properties. It is thus contemplated that various changes may be made in the peptide sequences of the disclosed compositions, or corresponding DNA sequences which encode said peptides without appreciable loss of their biological utility or activity.

TABLE 1

| | |
|---|---|
| Amino Acids | Codons |

| | | | |
|---|---|---|---|
| Alanine | Ala | A | GCA GCC GCG GCU |
| Cysteine | Cys | C | UGC UGU |
| Aspartic acid | Asp | D | GAC GAU |
| Glutamic acid | Glu | E | GAA GAG |
| Phenylalanine | Phe | F | UUC UUU |
| Glycine | Gly | G | GGA GGC GGG GGU |
| Histidine | His | H | CAC CAU |
| Isoleucine | Ile | I | AUA AUC AUU |
| Lysine | Lys | K | AAA AAG |
| Leucine | Leu | L | UUA UUG CUA CUC CUG CUU |
| Methionine | Met | M | AUG |
| Asparagine | Asn | N | AAC AAU |
| Proilne | Pro | P | CCA CCC CCG CCU |
| Glutamine | Gln | Q | CAA CAG |
| Arginine | Arg | R | AGA AGG CGA CGC CGG CGU |
| Serine | Ser | S | AGC AGU UCA UCC UCG UCU |
| Threonine | Thr | T | ACA ACC ACG ACU |
| Valine | Val | V | GUA GUC GUG GUU |
| Tryptophan | Trp | W | UGG |
| Tyrosine | Tyr | Y | UAC UAU |

[2043] In making such changes, the hydropathic index of amino acids may be considered. The importance of the hydropathic amino acid index in conferring interactive biologic function on a protein is generally understood in the art (Kyte and Doolittle, 1982, incorporated herein by reference). It is accepted that the relative hydropathic character of the amino acid contributes to the secondary structure of the resultant protein, which in turn defines the interaction of the protein with other molecules, for example, enzymes, substrates, receptors, DNA, antibodies, antigens, and the like. Each amino acid has been assigned a hydropathic index on the basis of its hydrophobicity and charge characteristics (Kyte and Doolittle, 1982). These values are: isoleucine (+4.5); valine (+4.2); leucine (+3.8); phenylalanine (+2.8); cysteine/cystine (+2.5); methionine (+1.9); alanine (+1.8); glycine (−0.4); threonine (−0.7); serine (−0.8); tryptophan (−0.9); tyrosine (−1.3); proline (−1.6); histidine (−3.2); glutamate (−3.5); glutamine (−3.5); aspartate (−3.5); asparagine (−3.5); lysine (−3.9); and arginine (−4.5).

[2044] It is known in the art that certain amino acids may be substituted by other amino acids having a similar hydropathic index or score and still result in a protein with similar biological activity, i.e. still obtain a biological functionally equivalent protein. In making such changes, the substitution of amino acids whose hydropathic indices are within ±2 is preferred, those within ±1 are particularly preferred, and those within ±0.5 are even more particularly preferred. It is also understood in the art that the substitution of like amino acids can be made effectively on the basis of hydrophilicity. U.S. Pat. No. 4,554,101 (specifically incorporated herein by reference in its entirety), states that the greatest local average hydrophilicity of a protein, as governed by the hydrophilicity of its adjacent amino acids, correlates with a biological property of the protein.

[2045] As detailed in U.S. Pat. No. 4,554,101, the following hydrophilicity values have been assigned to amino acid residues: arginine (+3.0); lysine (+3.0); aspartate (+3.0+1); glutamate (+3.0±1); serine (+0.3); asparagine (+0.2); glutamine (+0.2); glycine (0); threonine (−0.4); proline (−0.5+1); alanine (−0.5); histidine (−0.5); cysteine (−1.0); methionine (−1.3); valine (−1.5); leucine (−1.8); isoleucine (−1.8); tyrosine (−2.3); phenylalanine (−2.5); tryptophan (−3.4). It is understood that an amino acid can be substituted for another having a similar hydrophilicity value and still obtain a biologically equivalent, and in particular, an immunologically equivalent protein. In such changes, the substitution of amino acids whose hydrophilicity values are within ±2 is preferred, those within ±1 are particularly preferred, and those within ±0.5 are even more particularly preferred.

[2046] As outlined above, amino acid substitutions are generally therefore based on the relative similarity of the amino acid side-chain substituents, for example, their hydrophobicity, hydrophilicity, charge, size, and the like. Exemplary substitutions that take various of the foregoing characteristics into consideration are well known to those of skill in the art and include: arginine and lysine; glutamate and aspartate; serine and threonine; glutamine and asparagine; and valine, leucine and isoleucine.

[2047] In addition, any polynucleotide may be further modified to increase stability in vivo. Possible modifications include, but are not limited to, the addition of flanking sequences at the 5′ and/or 3′ ends; the use of phosphorothioate or 2′ O-methyl rather than phosphodiesterase linkages in the backbone; and/or the inclusion of nontraditional bases such as inosine, queosine and wybutosine, as well as acetyl- methyl-, thio- and other modified forms of adenine, cytidine, guanine, thymine and uridine.

[2048] Amino acid substitutions may further be made on the basis of similarity in polarity, charge, solubility, hydrophobicity, hydrophilicity and/or the amphipathic nature of the residues. For example, negatively charged amino acids include aspartic acid and glutamic acid; positively charged amino acids include lysine and arginine; and amino acids with uncharged polar head groups having similar hydrophilicity values include leucine, isoleucine and valine; glycine and alanine; asparagine and glutamine; and serine, threonine, phenylalanine and tyrosine. Other groups of amino acids that may represent conservative changes include: (1) ala, pro, gly, glu, asp, gin, asn, ser, thr; (2) cys, ser, tyr, thr; (3) val, ile, leu, met, ala, phe; (4) lys, arg, his; and (5) phe, tyr, trp, his. A variant may also, or alternatively, contain nonconservative changes. In a preferred embodiment, variant polypeptides differ from a native sequence by substitution, deletion or addition of five amino acids or fewer. Variants may also (or alternatively) be modified by, for example, the deletion or addition of amino acids that have minimal influence on the immunogenicity, secondary structure and hydropathic nature of the polypeptide.

[2049] As noted above, polypeptides may comprise a signal (or leader) sequence at the N-terminal end of the protein, which co-translationally or post-translationally directs transfer of the protein. The polypeptide may also be conjugated to a linker or other sequence for ease of synthesis, purification or identification of the polypeptide (e.g., poly-His), or to enhance binding of the polypeptide to a solid support. For example, a polypeptide may be conjugated to an immunoglobulin Fc region.

[2050] When comparing polypeptide sequences, two sequences are said to be “identical” if the sequence of amino acids in the two sequences is the same when aligned for maximum correspondence, as described below. Comparisons between two sequences are typically performed by comparing the sequences over a comparison window to identify and compare local regions of sequence similarity. A “comparison window” as used herein, refers to a segment of at least about 20 contiguous positions, usually 30 to about 75, 40 to about 50, in which a sequence may be compared to a reference sequence of the same number of contiguous positions after the two sequences are optimally aligned.

[2051] Optimal alignment of sequences for comparison may be conducted using the Megalign program in the Lasergene suite of bioinformatics software (DNASTAR, Inc., Madison, Wis.), using default parameters. This program embodies several alignment schemes described in the following references: Dayhoff, M. O. (1978) A model of evolutionary change in proteins Matrices for detecting distant relationships. In Dayhoff, M. O. (ed.) Atlas of Protein Sequence and Structure, National Biomedical Research Foundation, Washington D.C. Vol. 5, Suppl. 3, pp. 345-358; Hein J. (1990) Unified Approach to Alignment and Phylogenes pp. 626-645 Methods in Enzymology vol. 183, Academic Press, Inc., San Diego, Calif.; Higgins, D. G. and Sharp, P. M. (1989) CABIOS 5:151-153; Myers, E. W. and Muller W. (1988) CABIOS 4:11-17; Robinson, E. D. (1971) Comb. Theor 11:105; Saitou, N. Nei, M. (1987) Mol. Biol. Evol. 4:406-425; Sneath, P. H. A. and Sokal, R. R. (1973) Numerical Taxonomy—the Principles and Practice of Numerical Taxonomy, Freeman Press, San Francisco, Calif.; Wilbur, W. J. and Lipman, D. J. (1983) Proc. Natl. Acad., Sci. USA 80:726-730.

[2052] Alternatively, optimal alignment of sequences for comparison may be conducted by the local identity algorithm of Smith and Waterman (1981) Add. APL. Math 2:482, by the identity alignment algorithm of Needleman and Wunsch (1970) J. Mol. Biol. 48:443, by the search for similarity methods of Pearson and Lipman (1988) Proc. Natl. Acad. Sci. USA 85: 2444, by computerized implementations of these algorithms (GAP, BESTFIT, BLAST, FASTA, and TFASTA in the Wisconsin Genetics Software Package, Genetics Computer Group (GCG), 575 Science Dr., Madison, Wis.), or by inspection.

[2053] One preferred example of algorithms that are suitable for determining percent sequence identity and sequence similarity are the BLAST and BLAST 2.0 algorithms, which are described in Altschul et al. (1977) Nucl. Acids Res. 25:3389-3402 and Altschul et al. (1990) J. Mol. Biol. 215:403-410, respectively. BLAST and BLAST 2.0 can be used, for example with the parameters described herein, to determine percent sequence identity for the polynucleotides and polypeptides of the invention. Software for performing BLAST analyses is publicly available through the National Center for Biotechnology Information. For amino acid sequences, a scoring matrix can be used to calculate the cumulative score. Extension of the word hits in each direction are halted when: the cumulative alignment score falls off by the quantity X from its maximum achieved value; the cumulative score goes to zero or below, due to the accumulation of one or more negative-scoring residue alignments; or the end of either sequence is reached. The BLAST algorithm parameters W, T and X determine the sensitivity and speed of the alignment.

[2054] In one preferred approach, the “percentage of sequence identity” is determined by comparing two optimally aligned sequences over a window of comparison of at least 20 positions, wherein the portion of the polypeptide sequence in the comparison window may comprise additions or deletions (i.e., gaps) of 20 percent or less, usually 5 to 15 percent, or 10 to 12 percent, as compared to the reference sequences (which does not comprise additions or deletions) for optimal alignment of the two sequences. The percentage is calculated by determining the number of positions at which the identical amino acid residue occurs in both sequences to yield the number of matched positions, dividing the number of matched positions by the total number of positions in the reference sequence (i.e., the window size) and multiplying the results by 100 to yield the percentage of sequence identity.

[2055] Within other illustrative embodiments, a polypeptide may be a xenogeneic polypeptide that comprises an polypeptide having substantial sequence identity, as described above, to the human polypeptide (also termed autologous antigen) which served as a reference polypeptide, but which xenogeneic polypeptide is derived from a different, non-human species. One skilled in the art will recognize that “self” antigens are often poor stimulators of CD8+ and CD4⁺ T-lymphocyte responses, and therefore efficient immunotherapeutic strategies directed against tumor polypeptides require the development of methods to overcome immune tolerance to particular self tumor polypeptides. For example, humans immunized with prostase protein from a xenogeneic (non human) origin are capable of mounting an immune response against the counterpart human protein, e.g. the human prostase tumor protein present on human tumor cells. Accordingly, the present invention provides methods for purifying the xenogeneic form of the tumor proteins set forth herein, such as the polypeptide set forth in SEQ ID NOs:1789 and 1982, or those encoded by polynucleotide sequences set forth in SEQ ID NOs:1-1788 and 1790-1981.

[2056] Therefore, one aspect of the present invention provides xenogeneic variants of the polypeptide compositions described herein. Such xenogeneic variants generally encompassed by the present invention will typically exhibit at least about 70%, 75%, 80%, 85%, 90%, 91%, 92%, 93%, 94%, 95%, 96%, 97%, 98%, or 99% or more identity along their lengths, to a polypeptide sequences set forth herein.

[2057] More particularly, the invention is directed to mouse, rat, monkey, porcine and other non-human polypeptides which can be used as xenogeneic forms of human polypeptides set forth herein, to induce immune responses directed against tumor polypeptides of the invention.

[2058] Within other illustrative embodiments, a polypeptide may be a fusion polypeptide that comprises multiple polypeptides as described herein, or that comprises at least one polypeptide as described herein and an unrelated sequence, such as a known tumor protein. A fusion partner may, for example, assist in providing T helper epitopes (an immunological fusion partner), preferably T helper epitopes recognized by humans, or may assist in expressing the protein (an expression enhancer) at higher yields than the native recombinant protein. Certain preferred fusion partners are both immunological and expression enhancing fusion partners. Other fusion partners may be selected so as to increase the solubility of the polypeptide or to enable the polypeptide to be targeted to desired intracellular compartments. Still further fusion partners include affinity tags, which facilitate purification of the polypeptide.

[2059] Fusion polypeptides may generally be prepared using standard techniques, including chemical conjugation. Preferably, a fusion polypeptide is expressed as a recombinant polypeptide, allowing the production of increased levels, relative to a non-fused polypeptide, in an expression system. Briefly, DNA sequences encoding the polypeptide components may be assembled separately, and ligated into an appropriate expression vector. The 3′ end of the DNA sequence encoding one polypeptide component is ligated, with or without a peptide linker, to the 5′ end of a DNA sequence encoding the second polypeptide component so that the reading frames of the sequences are in phase. This permits translation into a single fusion polypeptide that retains the biological activity of both component polypeptides.

[2060] A peptide linker sequence may be employed to separate the first and second polypeptide components by a distance sufficient to ensure that each polypeptide folds into its secondary and tertiary structures. Such a peptide linker sequence is incorporated into the fusion polypeptide using standard techniques well known in the art. Suitable peptide linker sequences may be chosen based on the following factors: (1) their ability to adopt a flexible extended conformation; (2) their inability to adopt a secondary structure that could interact with functional epitopes on the first and second polypeptides; and (3) the lack of hydrophobic or charged residues that might react with the polypeptide functional epitopes. Preferred peptide linker sequences contain Gly, Asn and Ser residues. Other near neutral amino acids, such as Thr and Ala may also be used in the linker sequence. Amino acid sequences which may be usefully employed as linkers include those disclosed in Maratea et al., Gene 40:39-46,1985; Murphy et al., Proc. Natl. Acad. Sci. USA 83:8258-8262, 1986; U.S. Pat. No. 4,935,233 and U.S. Pat. No. 4,751,180. The linker sequence may generally be from 1 to about 50 amino acids in length. Linker sequences are not required when the first and second polypeptides have non-essential N-terminal amino acid regions that can be used to separate the functional domains and prevent steric interference.

[2061] The ligated DNA sequences are operably linked to suitable transcriptional or translational regulatory elements. The regulatory elements responsible for expression of DNA are located only 5′ to the DNA sequence encoding the first polypeptides. Similarly, stop codons required to end translation and transcription termination signals are only present 3′ to the DNA sequence encoding the second polypeptide.

[2062] The fusion polypeptide can comprise a polypeptide as described herein together with an unrelated immunogenic protein, such as an immunogenic protein capable of eliciting a recall response. Examples of such proteins include tetanus, tuberculosis and hepatitis proteins (see, for example, Stoute et al. New Engl. J. Med., 336:86-91, 1997).

[2063] In one preferred embodiment, the immunological fusion partner is derived from a Mycobacterium sp., such as a Mycobacterium tuberculosis-derived Ra12 fragment. Ra12 compositions and methods for their use in enhancing the expression and/or immunogenicity of heterologous polynucleotide/polypeptide sequences is described in U.S. Patent Application No. 60/158,585, the disclosure of which is incorporated herein by reference in its entirety. Briefly, Ra12 refers to a polynucleotide region that is a subsequence of a Mycobacterium tuberculosis MTB32A nucleic acid. MTB32A is a serine protease of 32 KD molecular weight encoded by a gene in virulent and avirulent strains of M. tuberculosis. The nucleotide sequence and amino acid sequence of MTB32A have been described (for example, U.S. Patent Application No. 60/158,585; see also, Skeiky et al., Infection and Immun. (1999) 67:3998-4007, incorporated herein by reference). C-terminal fragments of the MTB32A coding sequence express at high levels and remain as a soluble polypeptides throughout the purification process. Moreover, Ra12 may enhance the immunogenicity of heterologous immunogenic polypeptides with which it is fused. One preferred Ra12 fusion polypeptide comprises a 14 KD C-terminal fragment corresponding to amino acid residues 192 to 323 of MTB32A. Other preferred Ra12 polynucleotides generally comprise at least about 15 consecutive nucleotides, at least about 30 nucleotides, at least about 60 nucleotides, at least about 100 nucleotides, at least about 200 nucleotides, or at least about 300 nucleotides that encode a portion of a Ra12 polypeptide. Ra12 polynucleotides may comprise a native sequence (i.e., an endogenous sequence that encodes a Ra12 polypeptide or a portion thereof) or may comprise a variant of such a sequence. Ra12 polynucleotide variants may contain one or more substitutions, additions, deletions and/or insertions such that the biological activity of the encoded fusion polypeptide is not substantially diminished, relative to a fusion polypeptide comprising a native Ra12 polypeptide. Variants preferably exhibit at least about 70% identity, more preferably at least about 80% identity and most preferably at least about 90% identity to a polynucleotide sequence that encodes a native Ra12 polypeptide or a portion thereof.

[2064] Within other preferred embodiments, an immunological fusion partner is derived from protein D, a surface protein of the gram-negative bacterium Haemophilus influenza B (WO 91/18926). Preferably, a protein D derivative comprises approximately the first third of the protein (e.g., the first N-terminal 100-110 amino acids), and a protein D derivative may be lipidated. Within certain preferred embodiments, the first 109 residues of a Lipoprotein D fusion partner is included on the N-terminus to provide the polypeptide with additional exogenous T-cell epitopes and to increase the expression level in E. coli (thus functioning as an expression enhancer). The lipid tail ensures optimal presentation of the antigen to antigen presenting cells. Other fusion partners include the non-structural protein from influenzae virus, NS1 (hemaglutinin). Typically, the N-terminal 81 amino acids are used, although different fragments that include T-helper epitopes may be used.

[2065] In another embodiment, the immunological fusion partner is the protein known as LYTA, or a portion thereof (preferably a C-terminal portion). LYTA is derived from Streptococcus pneumoniae, which synthesizes an N-acetyl-L-alanine amidase known as amidase LYTA (encoded by the LYTA gene; Gene 43:265-292,1986). LYTA is an autolysin that specifically degrades certain bonds in the peptidoglycan backbone. The C-terminal domain of the LYTA protein is responsible for the affinity to the choline or to some choline analogues such as DEAE. This property has been exploited for the development of E. coli C-LYTA expressing plasmids useful for expression of fusion proteins. Purification of hybrid proteins containing the C-LYTA fragment at the amino terminus has been described (see Biotechnology 10:795-798, 1992). Within a preferred embodiment, a repeat portion of LYTA may be incorporated into a fusion polypeptide. A repeat portion is found in the C-terminal region starting at residue 178. A particularly preferred repeat portion incorporates residues 188-305.

[2066] Yet another illustrative embodiment involves fusion polypeptides, and the polynucleotides encoding them, wherein the fusion partner comprises a targeting signal capable of directing a polypeptide to the endosomal/lysosomal compartment, as described in U.S. Pat. No. 5,633,234. An immunogenic polypeptide of the invention, when fused with this targeting signal, will associate more efficiently with MHC class II molecules and thereby provide enhanced in vivo stimulation of CD4⁺ T-cells specific for the polypeptide.

[2067] Polypeptides of the invention are prepared using any of a variety of well known synthetic and/or recombinant techniques, the latter of which are further described below. Polypeptides, portions and other variants generally less than about 150 amino acids can be generated by synthetic means, using techniques well known to those of ordinary skill in the art. In one illustrative example, such polypeptides are synthesized using any of the commercially available solid-phase techniques, such as the Merrifield solid-phase synthesis method, where amino acids are sequentially added to a growing amino acid chain. See Merrifield, J. Am. Chem. Soc. 85:2149-2146, 1963. Equipment for automated synthesis of polypeptides is commercially available from suppliers such as Perkin Elmer/Applied BioSystems Division (Foster City, Calif.), and may be operated according to the manufacturer's instructions.

[2068] In general, polypeptide compositions (including fusion polypeptides) of the invention are isolated. An “isolated” polypeptide is one that is removed from its original environment. For example, a naturally-occurring protein or polypeptide is isolated if it is separated from some or all of the coexisting materials in the natural system. Preferably, such polypeptides are also purified, e.g., are at least about 90% pure, more preferably at least about 95% pure and most preferably at least about 99% pure.

[2069] Polynucleotide Compositions

[2070] The present invention, in other aspects, provides polynucleotide compositions. The terms “DNA” and “polynucleotide” are used essentially interchangeably herein to refer to a DNA molecule that has been isolated free of total genomic DNA of a particular species. “Isolated,” as used herein, means that a polynucleotide is substantially away from other coding sequences, and that the DNA molecule does not contain large portions of unrelated coding DNA, such as large chromosomal fragments or other functional genes or polypeptide coding regions. Of course, this refers to the DNA molecule as originally isolated, and does not exclude genes or coding regions later added to the segment by the hand of man.

[2071] As will be understood by those skilled in the art, the polynucleotide compositions of this invention can include genomic sequences, extra-genomic and plasmid-encoded sequences and smaller engineered gene segments that express, or may be adapted to express, proteins, polypeptides, peptides and the like. Such segments may be naturally isolated, or modified synthetically by the hand of man.

[2072] As will be also recognized by the skilled artisan, polynucleotides of the invention may be single-stranded (coding or antisense) or double-stranded, and may be DNA (genomic, cDNA or synthetic) or RNA molecules. RNA molecules may include HnRNA molecules, which contain introns and correspond to a DNA molecule in a one-to-one manner, and mRNA molecules, which do not contain introns. Additional coding or non-coding sequences may, but need not, be present within a polynucleotide of the present invention, and a polynucleotide may, but need not, be linked to other molecules and/or support materials.

[2073] Polynucleotides may comprise a native sequence (i.e., an endogenous sequence that encodes a polypeptide/protein of the invention or a portion thereof or may comprise a sequence that encodes a variant or derivative, preferably and immunogenic variant or derivative, of such a sequence.

[2074] Therefore, according to another aspect of the present invention, polynucleotide compositions are provided that comprise some or all of a polynucleotide sequence set forth in any one of SEQ ID NOs:1-1788 and 1790-1981, complements of a polynucleotide sequence set forth in any one of SEQ ID NOs:1-1788 and 1790-1981, and degenerate variants of a polynucleotide sequence set forth in any one of SEQ ID NOs:1-1788 and 1790-1981. In certain preferred embodiments, the polynucleotide sequences set forth herein encode immunogenic polypeptides, as described above.

[2075] In other related embodiments, the present invention provides polynucleotide variants having substantial identity to the sequences disclosed herein in SEQ ID NOs:1-1788 and 1790-1981, for example those comprising at least 70% sequence identity, preferably at least 75%, 80%, 85%, 90%, 95%, 96%, 97%, 98%, or 99% or higher, sequence identity compared to a polynucleotide sequence of this invention using the methods described herein, (e.g., BLAST analysis using standard parameters, as described below). One skilled in this art will recognize that these values can be appropriately adjusted to determine corresponding identity of proteins encoded by two nucleotide sequences by taking into account codon degeneracy, amino acid similarity, reading frame positioning and the like.

[2076] Typically, polynucleotide variants will contain one or more substitutions, additions, deletions and/or insertions, preferably such that the immunogenicity of the polypeptide encoded by the variant polynucleotide is not substantially diminished relative to a polypeptide encoded by a polynucleotide sequence specifically set forth herein). The term “variants” should also be understood to encompasses homologous genes of xenogenic origin.

[2077] In additional embodiments, the present invention provides polynucleotide fragments comprising or consisting of various lengths of contiguous stretches of sequence identical to or complementary to one or more of the sequences disclosed herein. For example, polynucleotides are provided by this invention that comprise or consist of at least about 10, 15, 20, 30, 40, 50, 75, 100, 150, 200, 300, 400, 500 or 1000 or more contiguous nucleotides of one or more of the sequences disclosed herein as well as all intermediate lengths there between. It will be readily understood that “intermediate lengths”, in this context, means any length between the quoted values, such as 16, 17, 18, 19, etc.; 21, 22, 23, etc.; 30, 31, 32, etc.; 50, 51, 52, 53, etc.; 100, 101, 102, 103, etc.; 150, 151, 152, 153, etc.; including all integers through 200-500; 500-1,000, and the like. A polynucleotide sequence as described here may be extended at one or both ends by additional nucleotides not found in the native sequence. This additional sequence may consist of 1, 2, 3, 4, 5, 6, 7, 8, 9, 10, 11, 12, 13, 14, 15, 16, 17, 18, 19, or 20 nucleotides at either end of the disclosed sequence or at both ends of the disclosed sequence.

[2078] In another embodiment of the invention, polynucleotide compositions are provided that are capable of hybridizing under moderate to high stringency conditions to a polynucleotide sequence provided herein, or a fragment thereof, or a complementary sequence thereof. Hybridization techniques are well known in the art of molecular biology. For purposes of illustration, suitable moderately stringent conditions for testing the hybridization of a polynucleotide of this invention with other polynucleotides include prewashing in a solution of 5×SSC, 0.5% SDS, 1.0 mM EDTA (pH 8.0); hybridizing at 50° C.-60° C., 5×SSC, overnight; followed by washing twice at 65° C. for 20 minutes with each of 2×, 0.5×and 0.2×SSC containing 0.1% SDS. One skilled in the art will understand that the stringency of hybridization can be readily manipulated, such as by altering the salt content of the hybridization solution and/or the temperature at which the hybridization is performed. For example, in another embodiment, suitable highly stringent hybridization conditions include those described above, with the exception that the temperature of hybridization is increased, e.g., to 60-65° C. or 65-70° C.

[2079] In certain preferred embodiments, the polynucleotides described above, e.g., polynucleotide variants, fragments and hybridizing sequences, encode polypeptides that are immunologically cross-reactive with a polypeptide sequence specifically set forth herein. In other preferred embodiments, such polynucleotides encode polypeptides that have a level of immunogenic activity of at least about 50%, preferably at least about 70%, and more preferably at least about 90% of that for a polypeptide sequence specifically set forth herein.

[2080] The polynucleotides of the present invention, or fragments thereof, regardless of the length of the coding sequence itself, may be combined with other DNA sequences, such as promoters, polyadenylation signals, additional restriction enzyme sites, multiple cloning sites, other coding segments, and the like, such that their overall length may vary considerably. It is therefore contemplated that a nucleic acid fragment of almost any length may be employed, with the total length preferably being limited by the ease of preparation and use in the intended recombinant DNA protocol. For example, illustrative polynucleotide segments with total lengths of about 10,000, about 5000, about 3000, about 2,000, about 1,000, about 500, about 200, about 100, about 50 base pairs in length, and the like, (including all intermediate lengths) are contemplated to be useful in many implementations of this invention.

[2081] When comparing polynucleotide sequences, two sequences are said to be “identical” if the sequence of nucleotides in the two sequences is the same when aligned for maximum correspondence, as described below. Comparisons between two sequences are typically performed by comparing the sequences over a comparison window to identify and compare local regions of sequence similarity. A “comparison window” as used herein, refers to a segment of at least about 20 contiguous positions, usually 30 to about 75, 40 to about 50, in which a sequence may be compared to a reference sequence of the same number of contiguous positions after the two sequences are optimally aligned.

[2082] Optimal alignment of sequences for comparison may be conducted using the Megalign program in the Lasergene suite of bioinformatics software (DNASTAR, Inc., Madison, Wis.), using default parameters. This program embodies several alignment schemes described in the following references: Dayhoff, M. O. (1978) A model of evolutionary change in proteins—Matrices for detecting distant relationships. In Dayhoff, M. O. (ed.) Atlas of Protein Sequence and Structure, National Biomedical Research Foundation, Washington D.C. Vol. 5, Suppl. 3, pp. 345-358; Hein J. (1990) Unified Approach to Alignment and Phylogenes pp. 626-645 Methods in Enzymology vol. 183, Academic Press, Inc., San Diego, Calif.; Higgins, D. G. and Sharp, P. M. (1989) CABIOS 5:151-153; Myers, E. W. and Muller W. (1988) CABIOS 4:11-17; Robinson, E. D. (1971) Comb. Theor 11:105; Santou, N. Nes, M. (1987) Mol. Biol. Evol. 4:406-425; Sneath, P. H. A. and Sokal, R. R. (1973) Numerical Taxonomy—the Principles and Practice of Numerical Taxonomy, Freeman Press, San Francisco, Calif.; Wilbur, W. J. and Lipman, D. J. (1983) Proc. Natl. Acad., Sci. USA 80:726-730.

[2083] Alternatively, optimal alignment of sequences for comparison may be conducted by the local identity algorithm of Smith and Waterman (1981) Add. APL. Math 2:482, by the identity alignment algorithm of Needleman and Wunsch (1970) J. Mol. Biol. 48:443, by the search for similarity methods of Pearson and Lipman (1988) Proc. Natl. Acad. Sci. USA 85: 2444, by computerized implementations of these algorithms (GAP, BESTFIT, BLAST, FASTA, and TFASTA in the Wisconsin Genetics Software Package, Genetics Computer Group (GCG), 575 Science Dr., Madison, Wis.), or by inspection.

[2084] One preferred example of algorithms that are suitable for determining percent sequence identity and sequence similarity are the BLAST and BLAST 2.0 algorithms, which are described in Altschul et al. (1977) Nucl. Acids Res. 25:3389-3402 and Altschul et al. (1990) J. Mol. Biol. 215:403-410, respectively. BLAST and BLAST 2.0 can be used, for example with the parameters described herein, to determine percent sequence identity for the polynucleotides of the invention. Software for performing BLAST analyses is publicly available through the National Center for Biotechnology Information. In one illustrative example, cumulative scores can be calculated using, for nucleotide sequences, the parameters M (reward score for a pair of matching residues; always >0) and N (penalty score for mismatching residues; always <0). Extension of the word hits in each direction are halted when: the cumulative alignment score falls off by the quantity X from its maximum achieved value; the cumulative score goes to zero or below, due to the accumulation of one or more negative-scoring residue alignments; or the end of either sequence is reached. The BLAST algorithm parameters W, T and X determine the sensitivity and speed of the alignment. The BLASTN program (for nucleotide sequences) uses as defaults a wordlength (W) of 11, and expectation (E) of 10, and the BLOSUM62 scoring matrix (see Henikoff and Henikoff (1989) Proc. Natl. Acad. Sci. USA 89:10915) alignments, (B) of 50, expectation (E) of 10, M=5, N=-4 and a comparison of both strands.

[2085] Preferably, the “percentage of sequence identity” is determined by comparing two optimally aligned sequences over a window of comparison of at least 20 positions, wherein the portion of the polynucleotide sequence in the comparison window may comprise additions or deletions (i.e., gaps) of 20 percent or less, usually 5 to 15 percent, or 10 to 12 percent, as compared to the reference sequences (which does not comprise additions or deletions) for optimal alignment of the two sequences. The percentage is calculated by determining the number of positions at which the identical nucleic acid bases occurs in both sequences to yield the number of matched positions, dividing the number of matched positions by the total number of positions in the reference sequence (i.e., the window size) and multiplying the results by 100 to yield the percentage of sequence identity.

[2086] It will be appreciated by those of ordinary skill in the art that, as a result of the degeneracy of the genetic code, there are many nucleotide sequences that encode a polypeptide as described herein. Some of these polynucleotides bear minimal homology to the nucleotide sequence of any native gene. Nonetheless, polynucleotides that vary due to differences in codon usage are specifically contemplated by the present invention. Further, alleles of the genes comprising the polynucleotide sequences provided herein are within the scope of the present invention. Alleles are endogenous genes that are altered as a result of one or more mutations, such as deletions, additions and/or substitutions of nucleotides. The resulting mRNA and protein may, but need not, have an altered structure or function. Alleles may be identified using standard techniques (such as hybridization, amplification and/or database sequence comparison).

[2087] Therefore, in another embodiment of the invention, a mutagenesis approach, such as site-specific mutagenesis, is employed for the preparation of immunogenic variants and/or derivatives of the polypeptides described herein. By this approach, specific modifications in a polypeptide sequence can be made through mutagenesis of the underlying polynucleotides that encode them. These techniques provides a straightforward approach to prepare and test sequence variants, for example, incorporating one or more of the foregoing considerations, by introducing one or more nucleotide sequence changes into the polynucleotide.

[2088] Site-specific mutagenesis allows the production of mutants through the use of specific oligonucleotide sequences which encode the DNA sequence of the desired mutation, as well as a sufficient number of adjacent nucleotides, to provide a primer sequence of sufficient size and sequence complexity to form a stable duplex on both sides of the deletion junction being traversed. Mutations may be employed in a selected polynucleotide sequence to improve, alter, decrease, modify, or otherwise change the properties of the polynucleotide itself, and/or alter the properties, activity, composition, stability, or primary sequence of the encoded polypeptide.

[2089] In certain embodiments of the present invention, the inventors contemplate the mutagenesis of the disclosed polynucleotide sequences to alter one or more properties of the encoded polypeptide, such as the immunogenicity of a polypeptide vaccine. The techniques of site-specific mutagenesis are well-known in the art, and are widely used to create variants of both polypeptides and polynucleotides. For example, site-specific mutagenesis is often used to alter a specific portion of a DNA molecule. In such embodiments, a primer comprising typically about 14 to about 25 nucleotides or so in length is employed, with about 5 to about 10 residues on both sides of the junction of the sequence being altered.

[2090] As will be appreciated by those of skill in the art, site-specific mutagenesis techniques have often employed a phage vector that exists in both a single stranded and double stranded form. Typical vectors useful in site-directed mutagenesis include vectors such as the M13 phage. These phage are readily commercially-available and their use is generally well-known to those skilled in the art. Double-stranded plasmids are also routinely employed in site directed mutagenesis that eliminates the step of transferring the gene of interest from a plasmid to a phage.

[2091] In general, site-directed mutagenesis in accordance herewith is performed by first obtaining a single-stranded vector or melting apart of two strands of a double-stranded vector that includes within its sequence a DNA sequence that encodes the desired peptide. An oligonucleotide primer bearing the desired mutated sequence is prepared, generally synthetically. This primer is then annealed with the single-stranded vector, and subjected to DNA polymerizing enzymes such as E. coli polymerase I Klenow fragment, in order to complete the synthesis of the mutation-bearing strand. Thus, a heteroduplex is formed wherein one strand encodes the original non-mutated sequence and the second strand bears the desired mutation. This heteroduplex vector is then used to transform appropriate cells, such as E. coli cells, and clones are selected which include recombinant vectors bearing the mutated sequence arrangement.

[2092] The preparation of sequence variants of the selected peptide-encoding DNA segments using site-directed mutagenesis provides a means of producing potentially useful species and is not meant to be limiting as there are other ways in which sequence variants of peptides and the DNA sequences encoding them may be obtained. For example, recombinant vectors encoding the desired peptide sequence may be treated with mutagenic agents, such as hydroxylamine, to obtain sequence variants. Specific details regarding these methods and protocols are found in the teachings of Maloy et al., 1994; Segal, 1976; Prokop and Bajpai, 1991; Kuby, 1994; and Maniatis et al., 1982, each incorporated herein by reference, for that purpose.

[2093] As used herein, the term “oligonucleotide directed mutagenesis procedure” refers to template-dependent processes and vector-mediated propagation which result in an increase in the concentration of a specific nucleic acid molecule relative to its initial concentration, or in an increase in the concentration of a detectable signal, such as amplification. As used herein, the term “oligonucleotide directed mutagenesis procedure” is intended to refer to a process that involves the template-dependent extension of a primer molecule. The term template dependent process refers to nucleic acid synthesis of an RNA or a DNA molecule wherein the sequence of the newly synthesized strand of nucleic acid is dictated by the well-known rules of complementary base pairing (see, for example, Watson, 1987). Typically, vector mediated methodologies involve the introduction of the nucleic acid fragment into a DNA or RNA vector, the clonal amplification of the vector, and the recovery of the amplified nucleic acid fragment. Examples of such methodologies are provided by U.S. Pat. No. 4,237,224, specifically incorporated herein by reference in its entirety.

[2094] In another approach for the production of polypeptide variants of the present invention, recursive sequence recombination, as described in U.S. Pat. No. 5,837,458, may be employed. In this approach, iterative cycles of recombination and screening or selection are performed to “evolve” individual polynucleotide variants of the invention having, for example, enhanced immunogenic activity.

[2095] In other embodiments of the present invention, the polynucleotide sequences provided herein can be advantageously used as probes or primers for nucleic acid hybridization. As such, it is contemplated that nucleic acid segments that comprise or consist of a sequence region of at least about a 15 nucleotide long contiguous sequence that has the same sequence as, or is complementary to, a 15 nucleotide long contiguous sequence disclosed herein will find particular utility. Longer contiguous identical or complementary sequences, e.g., those of about 20, 30, 40, 50, 100, 200, 500, 1000 (including all intermediate lengths) and even up to full length sequences will also be of use in certain embodiments.

[2096] The ability of such nucleic acid probes to specifically hybridize to a sequence of interest will enable them to be of use in detecting the presence of complementary sequences in a given sample. However, other uses are also envisioned, such as the use of the sequence information for the preparation of mutant species primers, or primers for use in preparing other genetic constructions.

[2097] Polynucleotide molecules having sequence regions consisting of contiguous nucleotide stretches of 10-14, 15-20, 30, 50, or even of 100-200 nucleotides or so (including intermediate lengths as well), identical or complementary to a polynucleotide sequence disclosed herein, are particularly contemplated as hybridization probes for use in, e.g., Southern and Northern blotting. This would allow a gene product, or fragment thereof, to be analyzed, both in diverse cell types and also in various bacterial cells. The total size of fragment, as well as the size of the complementary stretch(es), will ultimately depend on the intended use or application of the particular nucleic acid segment. Smaller fragments will generally find use in hybridization embodiments, wherein the length of the contiguous complementary region may be varied, such as between about 15 and about 100 nucleotides, but larger contiguous complementarity stretches may be used, according to the length complementary sequences one wishes to detect.

[2098] The use of a hybridization probe of about 15-25 nucleotides in length allows the formation of a duplex molecule that is both stable and selective. Molecules having contiguous complementary sequences over stretches greater than 15 bases in length are generally preferred, though, in order to increase stability and selectivity of the hybrid, and thereby improve the quality and degree of specific hybrid molecules obtained. One will generally prefer to design nucleic acid molecules having gene-complementary stretches of 15 to 25 contiguous nucleotides, or even longer where desired.

[2099] Hybridization probes may be selected from any portion of any of the sequences disclosed herein. All that is required is to review the sequences set forth herein, or to any continuous portion of the sequences, from about 15-25 nucleotides in length up to and including the full length sequence, that one wishes to utilize as a probe or primer. The choice of probe and primer sequences may be governed by various factors. For example, one may wish to employ primers from towards the termini of the total sequence.

[2100] Small polynucleotide segments or fragments may be readily prepared by, for example, directly synthesizing the fragment by chemical means, as is commonly practiced using an automated oligonucleotide synthesizer. Also, fragments may be obtained by application of nucleic acid reproduction technology, such as the PCR™ technology of U.S. Pat. No. 4,683,202 (incorporated herein by reference), by introducing selected sequences into recombinant vectors for recombinant production, and by other recombinant DNA techniques generally known to those of skill in the art of molecular biology.

[2101] The nucleotide sequences of the invention may be used for their ability to selectively form duplex molecules with complementary stretches of the entire gene or gene fragments of interest. Depending on the application envisioned, one will typically desire to employ varying conditions of hybridization to achieve varying degrees of selectivity of probe towards target sequence. For applications requiring high selectivity, one will typically desire to employ relatively stringent conditions to form the hybrids, e.g., one will select relatively low salt and/or high temperature conditions, such as provided by a salt concentration of from about 0.02 M to about 0.15 M salt at temperatures of from about 50° C. to about 70° C. Such selective conditions tolerate little, if any, mismatch between the probe and the template or target strand, and would be particularly suitable for isolating related sequences.

[2102] Of course, for some applications, for example, where one desires to prepare mutants employing a mutant primer strand hybridized to an underlying template, less stringent (reduced stringency) hybridization conditions will typically be needed in order to allow formation of the heteroduplex. In these circumstances, one may desire to employ salt conditions such as those of from about 0.15 M to about 0.9 M salt, at temperatures ranging from about 20° C. to about 55° C. Cross-hybridizing species can thereby be readily identified as positively hybridizing signals with respect to control hybridizations. In any case, it is generally appreciated that conditions can be rendered more stringent by the addition of increasing amounts of formamide, which serves to destabilize the hybrid duplex in the same manner as increased temperature. Thus, hybridization conditions can be readily manipulated, and thus will generally be a method of choice depending on the desired results.

[2103] According to another embodiment of the present invention, polynucleotide compositions comprising antisense oligonucleotides are provided. Antisense oligonucleotides have been demonstrated to be effective and targeted inhibitors of protein synthesis, and, consequently, provide a therapeutic approach by which a disease can be treated by inhibiting the synthesis of proteins that contribute to the disease. The efficacy of antisense oligonucleotides for inhibiting protein synthesis is well established. For example, the synthesis of polygalactauronase and the muscarine type 2 acetylcholine receptor are inhibited by antisense oligonucleotides directed to their respective mRNA sequences (U.S. Pat. No. 5,739,119 and U.S. Pat. No. 5,759,829). Further, examples of antisense inhibition have been demonstrated with the nuclear protein cyclin, the multiple drug resistance gene (MDG1), ICAM-1, E-selectin, STK-1, striatal GABAA receptor and human EGF (Jaskulski et al., Science. Jun. 10, 1988;240(4858):1544-6; Vasanthakumar and Ahmed, Cancer Commun. 1989;1 (4):225-32; Peris et al., Brain Res Mol Brain Res. Jun. 15, 1998;57(2):310-20; U.S. Pat. No. 5,801,154; U.S. Pat. No. 5,789,573; U.S. Pat. No. 5,718,709 and U.S. Pat. No. 5,610,288). Antisense constructs have also been described that inhibit and can be used to treat a variety of abnormal cellular proliferations, e.g. cancer (U.S. Pat. No. 5,747,470; U.S. Pat. No. 5,591,317 and U.S. Pat. No. 5,783,683).

[2104] Therefore, in certain embodiments, the present invention provides oligonucleotide sequences that comprise all, or a portion of, any sequence that is capable of specifically binding to polynucleotide sequence described herein, or a complement thereof. In one embodiment, the antisense oligonucleotides comprise DNA or derivatives thereof. In another embodiment, the oligonucleotides comprise RNA or derivatives thereof. In a third embodiment, the oligonucleotides are modified DNAs comprising a phosphorothioated modified backbone. In a fourth embodiment, the oligonucleotide sequences comprise peptide nucleic acids or derivatives thereof. In each case, preferred compositions comprise a sequence region that is complementary, and more preferably substantially-complementary, and even more preferably, completely complementary to one or more portions of polynucleotides disclosed herein. Selection of antisense compositions specific for a given gene sequence is based upon analysis of the chosen target sequence and determination of secondary structure, Tₘ, binding energy, and relative stability. Antisense compositions may be selected based upon their relative inability to form dimers, hairpins, or other secondary structures that would reduce or prohibit specific binding to the target mRNA in a host cell. Highly preferred target regions of the mRNA, are those which are at or near the AUG translation initiation codon, and those sequences which are substantially complementary to 5′ regions of the mRNA. These secondary structure analyses and target site selection considerations can be performed, for example, using v.4 of the OLIGO primer analysis software and/or the BLASTN 2.0.5 algorithm software (Altschul et al., Nucleic Acids Res. 1997, 25(17):3389-402).

[2105] The use of an antisense delivery method employing a short peptide vector, termed MPG (27 residues), is also contemplated. The MPG peptide contains a hydrophobic domain derived from the fusion sequence of HIV gp41 and a hydrophilic domain from the nuclear localization sequence of SV40 T-antigen (Morris et al., Nucleic Acids Res. Jul. 15, 1997;25(14):2730-6). It has been demonstrated that several molecules of the MPG peptide coat the antisense oligonucleotides and can be delivered into cultured mammalian cells in less than 1 hour with relatively high efficiency (90%). Further, the interaction with MPG strongly increases both the stability of the oligonucleotide to nuclease and the ability to cross the plasma membrane.

[2106] According to another embodiment of the invention, the polynucleotide compositions described herein are used in the design and preparation of ribozyme molecules for inhibiting expression of the tumor polypeptides and proteins of the present invention in tumor cells. Ribozymes are RNA-protein complexes that cleave nucleic acids in a site-specific fashion. Ribozymes have specific catalytic domains that possess endonuclease activity (Kim and Cech, Proc Natl Acad Sci U S A. 1987 December;84(24):8788-92; Forster and Symons, Cell. Apr. 24, 1987;49(2):211-20). For example, a large number of ribozymes accelerate phosphoester transfer reactions with a high degree of specificity, often cleaving only one of several phosphoesters in an oligonucleotide substrate (Cech et al., Cell. 1981 Dec;27(3 Pt 2):487-96; Michel and Westhof, J. Mol. Biol. Dec. 5, 1990;216(3):585-610; Reinhold-Hurek and Shub, Nature. May 14, 1992;357(6374):173-6). This specificity has been attributed to the requirement that the substrate bind via specific base-pairing interactions to the internal guide sequence (“IGS”) of the ribozyme prior to chemical reaction.

[2107] Six basic varieties of naturally-occurring enzymatic RNAs are known presently. Each can catalyze the hydrolysis of RNA phosphodiester bonds in trans (and thus can cleave other RNA molecules) under physiological conditions. In general, enzymatic nucleic acids act by first binding to a target RNA. Such binding occurs through the target binding portion of a enzymatic nucleic acid which is held in close proximity to an enzymatic portion of the molecule that acts to cleave the target RNA. Thus, the enzymatic nucleic acid first recognizes and then binds a target RNA through complementary base-pairing, and once bound to the correct site, acts enzymatically to cut the target RNA. Strategic cleavage of such a target RNA will destroy its ability to direct synthesis of an encoded protein. After an enzymatic nucleic acid has bound and cleaved its RNA target, it is released from that RNA to search for another target and can repeatedly bind and cleave new targets.

[2108] The enzymatic nature of a ribozyme is advantageous over many technologies, such as antisense technology (where a nucleic acid molecule simply binds to a nucleic acid target to block its translation) since the concentration of ribozyme necessary to affect a therapeutic treatment is lower than that of an antisense oligonucleotide. This advantage reflects the ability of the ribozyme to act enzymatically. Thus, a single ribozyme molecule is able to cleave many molecules of target RNA. In addition, the ribozyme is a highly specific inhibitor, with the specificity of inhibition depending not only on the base pairing mechanism of binding to the target RNA, but also on the mechanism of target RNA cleavage. Single mismatches, or base-substitutions, near the site of cleavage can completely eliminate catalytic activity of a ribozyme. Similar mismatches in antisense molecules do not prevent their action (Woolf et al., Proc Natl Acad Sci USA. Aug. 15, 1992;89(16):7305-9). Thus, the specificity of action of a ribozyme is greater than that of an antisense oligonucleotide binding the same RNA site.

[2109] The enzymatic nucleic acid molecule may be formed in a hammerhead, hairpin, a hepatitis δ virus, group I intron or RNaseP RNA (in association with an RNA guide sequence) or Neurospora VS RNA motif. Examples of hammerhead motifs are described by Rossi et al. Nucleic Acids Res. Sep. 11, 1992;20(17):4559-65. Examples of hairpin motifs are described by Hampel et al. (Eur. Pat. Appl. Publ. No. EP 0360257), Hampel and Tritz, Biochemistry Jun. 13, 1989;28(12): 4929-33; Hampel et a., Nucleic Acids Res. Jan. 25, 1990;18(2):299-304 and U.S. Pat. No. 5,631,359. An example of the hepatitis δ virus motif is described by Perrotta and Been, Biochemistry. Dec. 1, 1992;31(47): 11843-52; an example of the RNaseP motif is described by Guerrier-Takada et al., Cell. 1983 December;35(3 Pt 2):849-57; Neurospora VS RNA ribozyme motif is described by Collins (Saville and Collins, Cell. May 18, 1990;61(4):685-96; Saville and Collins, Proc Natl Acad Sci USA. Oct. 1, 1991;88(19):8826-30; Collins and Olive, Biochemistry. Mar. 23, 1993;32(11):2795-9); and an example of the Group I intron is described in (U.S. Pat. No. 4,987,071). All that is important in an enzymatic nucleic acid molecule of this invention is that it has a specific substrate binding site which is complementary to one or more of the target gene RNA regions, and that it have nucleotide sequences within or surrounding that substrate binding site which impart an RNA cleaving activity to the molecule. Thus the ribozyme constructs need not be limited to specific motifs mentioned herein.

[2110] Ribozymes may be designed as described in Int. Pat. Appl. Publ. No. WO 93/23569 and Int. Pat. Appl. Publ. No. WO 94/02595, each specifically incorporated herein by reference) and synthesized to be tested in vitro and in vivo, as described. Such ribozymes can also be optimized for delivery. While specific examples are provided, those in the art will recognize that equivalent RNA targets in other species can be utilized when necessary.

[2111] Ribozyme activity can be optimized by altering the length of the ribozyme binding arms, or chemically synthesizing ribozymes with modifications that prevent their degradation by serum ribonucleases (see e.g., Int. Pat. Appl. Publ. No. WO 92/07065; Int. Pat. Appl. Publ. No. WO 93/15187; Int. Pat. Appl. Publ. No. WO 91/03162; Eur. Pat. Appl. Publ. No. 92110298.4; U.S. Pat. No. 5,334,711; and Int. Pat. Appl. Publ. No. WO 94/13688, which describe various chemical modifications that can be made to the sugar moieties of enzymatic RNA molecules), modifications which enhance their efficacy in cells, and removal of stem II bases to shorten RNA synthesis times and reduce chemical requirements.

[2112] Sullivan et al., (Int. Pat. Appl. Publ. No. WO 94/02595) describes the general methods for delivery of enzymatic RNA molecules. Ribozymes may be administered to cells by a variety of methods known to those familiar to the art, including, but not restricted to, encapsulation in liposomes, by iontophoresis, or by incorporation into other vehicles, such as hydrogels, cyclodextrins, biodegradable nanocapsules, and bioadhesive microspheres. For some indications, ribozymes may be directly delivered ex vivo to cells or tissues with or without the aforementioned vehicles. Alternatively, the RNA/vehicle combination may be locally delivered by direct inhalation, by direct injection or by use of a catheter, infusion pump or stent. Other routes of delivery include, but are not limited to, intravascular, intramuscular, subcutaneous or joint injection, aerosol inhalation, oral (tablet or pill form), topical, systemic, ocular, intraperitoneal and/or intrathecal delivery. More detailed descriptions of ribozyme delivery and administration are provided in Int. Pat. Appl. Publ. No. WO 94/02595 and Int. Pat. Appl. Publ. No. WO 93/23569, each specifically incorporated herein by reference.

[2113] Another means of accumulating high concentrations of a ribozyme(s) within cells is to incorporate the ribozyme-encoding sequences into a DNA expression vector. Transcription of the ribozyme sequences are driven from a promoter for eukaryotic RNA polymerase I (pol I), RNA polymerase 11 (pol II), or RNA polymerase III (pol III). Transcripts from pol II or pol II promoters will be expressed at high levels in all cells; the levels of a given pol II promoter in a given cell type will depend on the nature of the gene regulatory sequences (enhancers, silencers, etc.) present nearby. Prokaryotic RNA polymerase promoters may also be used, providing that the prokaryotic RNA polymerase enzyme is expressed in the appropriate cells Ribozymes expressed from such promoters have been shown to function in mammalian cells. Such transcription units can be incorporated into a variety of vectors for introduction into mammalian cells, including but not restricted to, plasmid DNA vectors, viral DNA vectors (such as adenovirus or adeno-associated vectors), or viral RNA vectors (such as retroviral, semliki forest virus, sindbis virus vectors).

[2114] In another embodiment of the invention, peptide nucleic acids (PNAs) compositions are provided. PNA is a DNA mimic in which the nucleobases are attached to a pseudopeptide backbone (Good and Nielsen, Antisense Nucleic Acid Drug Dev. 1997 7(4) 431-37). PNA is able to be utilized in a number methods that traditionally have used RNA or DNA. Often PNA sequences perform better in techniques than the corresponding RNA or DNA sequences and have utilities that are not inherent to RNA or DNA. A review of PNA including methods of making, characteristics of, and methods of using, is provided by Corey (Trends Biotechnol 1997 June;15(6):224-9). As such, in certain embodiments, one may prepare PNA sequences that are complementary to one or more portions of the ACE mRNA sequence, and such PNA compositions may be used to regulate, alter, decrease, or reduce the translation of ACE-specific mRNA, and thereby alter the level of ACE activity in a host cell to which such PNA compositions have been administered.

[2115] PNAs have 2-aminoethyl-glycine linkages replacing the normal phosphodiester backbone of DNA (Nielsen et al., Science Dec. 6, 1991;254(5037):1497-500; Hanvey et al., Science. Nov. 27, 1992;258(5087):1481-5; Hyrup and Nielsen, Bioorg Med Chem. 1996 January;4(1):5-23). This chemistry has three important consequences: firstly, in contrast to DNA or phosphorothioate oligonucleotides, PNAs are neutral molecules; secondly, PNAs are achiral, which avoids the need to develop a stereoselective synthesis; and thirdly, PNA synthesis uses standard Boc or Fmoc protocols for solid-phase peptide synthesis, although other methods, including a modified Merrifield method, have been used.

[2116] PNA monomers or ready-made oligomers are commercially available from PerSeptive Biosystems (Framingham, Mass.). PNA syntheses by either Boc or Fmoc protocols are straightforward using manual or automated protocols (Norton et al., Bioorg Med Chem. 1995 April;3(4):437-45). The manual protocol lends itself to the production of chemically modified PNAs or the simultaneous synthesis of families of closely related PNAs.

[2117] As with peptide synthesis, the success of a particular PNA synthesis will depend on the properties of the chosen sequence. For example, while in theory PNAs can incorporate any combination of nucleotide bases, the presence of adjacent purines can lead to deletions of one or more residues in the product. In expectation of this difficulty, it is suggested that, in producing PNAs with adjacent purines, one should repeat the coupling of residues likely to be added inefficiently. This should be followed by the purification of PNAs by reverse-phase high-pressure liquid chromatography, providing yields and purity of product similar to those observed during the synthesis of peptides.

[2118] Modifications of PNAs for a given application may be accomplished by coupling amino acids during solid-phase synthesis or by attaching compounds that contain a carboxylic acid group to the exposed N-terminal amine. Alternatively, PNAs can be modified after synthesis by coupling to an introduced lysine or cysteine. The ease with which PNAs can be modified facilitates optimization for better solubility or for specific functional requirements. Once synthesized, the identity of PNAs and their derivatives can be confirmed by mass spectrometry. Several studies have made and utilized modifications of PNAs (for example, Norton et al., Bioorg Med Chem. 1995 April;3(4):437-45; Petersen et al., J Pept Sci. 1995 May-June;1(3):175-83; Orum et al., Biotechniques. 1995 September; 19(3):472-80; Footer et al., Biochemistry. Aug. 20, 1996;35(33):10673-9; Griffith et al., Nucleic Acids Res. Aug. 11, 1995;23(15):3003-8; Pardridge et al., Proc Natl Acad Sci USA. Jun. 6, 1995;92(12):5592-6; Boffa et al., Proc Natl Acad Sci U S A. Mar. 14, 1995;92(6):1901-5; Gambacorti-Passerini et al., Blood. Aug. 15, 1996;88(4):1411-7; Armitage et al., Proc Natl Acad Sci USA. Nov. 11, 1997;94(23): 12320-5; Seeger et a., Biotechniques. 1997 September;23(3):512-7). U.S. Pat. No. 5,700,922 discusses PNA-DNA-PNA chimeric molecules and their uses in diagnostics, modulating protein in organisms, and treatment of conditions susceptible to therapeutics.

[2119] Methods of characterizing the antisense binding properties of PNAs are discussed in Rose (Anal Chem. Dec. 15, 1993;65(24):3545-9) and Jensen et a. (Biochemistry. Apr. 22, 1997;36(16):5072-7). Rose uses capillary gel electrophoresis to determine binding of PNAs to their complementary oligonucleotide, measuring the relative binding kinetics and stoichiometry. Similar types of measurements were made by Jensen et al. using BIAcore™ technology.

[2120] Other applications of PNAs that have been described and will be apparent to the skilled artisan include use in DNA strand invasion, antisense inhibition, mutational analysis, enhancers of transcription, nucleic acid purification, isolation of transcriptionally active genes, blocking of transcription factor binding, genome cleavage, biosensors, in situ hybridization, and the like.

[2121] Polynucleotide Identification, Characterization and Expression

[2122] Polynucleotides compositions of the present invention may be identified, prepared and/or manipulated using any of a variety of well established techniques (see generally, Sambrook et al., Molecular Cloning: A Laboratory Manual, Cold Spring Harbor Laboratories, Cold Spring Harbor, N.Y., 1989, and other like references). For example, a polynucleotide may be identified, as described in more detail below, by screening a microarray of cDNAs for tumor-associated expression (i.e., expression that is at least two fold greater in a tumor than in normal tissue, as determined using a representative assay provided herein). Such screens may be performed, for example, using the microarray technology of Affymetrix, Inc. (Santa Clara, Calif.) according to the manufacturer's instructions (and essentially as described by Schena et al., Proc. Natl. Acad. Sci. USA 93:10614-10619, 1996 and Heller et al., Proc. Natl. Acad. Sci. USA 94:2150-2155, 1997). Alternatively, polynucleotides may be amplified from cDNA prepared from cells expressing the proteins described herein, such as tumor cells.

[2123] Many template dependent processes are available to amplify a target sequences of interest present in a sample. One of the best known amplification methods is the polymerase chain reaction (PCR™) which is described in detail in U.S. Pat. Nos. 4,683,195, 4,683,202 and 4,800,159, each of which is incorporated herein by reference in its entirety. Briefly, in PCR™, two primer sequences are prepared which are complementary to regions on opposite complementary strands of the target sequence. An excess of deoxynucleoside triphosphates is added to a reaction mixture along with a DNA polymerase (e.g., Taq polymerase). If the target sequence is present in a sample, the primers will bind to the target and the polymerase will cause the primers to be extended along the target sequence by adding on nucleotides. By raising and lowering the temperature of the reaction mixture, the extended primers will dissociate from the target to form reaction products, excess primers will bind to the target and to the reaction product and the process is repeated. Preferably reverse transcription and PCR™ amplification procedure may be performed in order to quantify the amount of mRNA amplified. Polymerase chain reaction methodologies are well known in the art.

[2124] Any of a number of other template dependent processes, many of which are variations of the PCR m amplification technique, are readily known and available in the art. Illustratively, some such methods include the ligase chain reaction (referred to as LCR), described, for example, in Eur. Pat. Appl. Publ. No. 320,308 and U.S. Pat. No. 4,883,750; Qbeta Replicase, described in PCT Intl. Pat. Appl. Publ. No. PCT/US87/00880; Strand Displacement Amplification (SDA) and Repair Chain Reaction (RCR). Still other amplification methods are described in Great Britain Pat. Appl. No. 2 202 328, and in PCT Intl. Pat. Appl. Publ. No. PCT/US89/01025. Other nucleic acid amplification procedures include transcription-based amplification systems (TAS) (PCT Intl. Pat. Appl. Publ. No. WO 88/10315), including nucleic acid sequence based amplification (NASBA) and 3SR. Eur. Pat. Appl. Publ. No. 329,822 describes a nucleic acid amplification process involving cyclically synthesizing single-stranded RNA (“ssRNA”), ssDNA, and double-stranded DNA (dsDNA). PCT Intl. Pat. Appl. Publ. No. WO 89/06700 describes a nucleic acid sequence amplification scheme based on the hybridization of a promoter/primer sequence to a target single-stranded DNA (“ssDNA”) followed by transcription of many RNA copies of the sequence. Other amplification methods such as “RACE” (Frohman, 1990), and “one-sided PCR” (Ohara, 1989) are also well-known to those of skill in the art.

[2125] An amplified portion of a polynucleotide of the present invention may be used to isolate a full length gene from a suitable library (e.g., a tumor cDNA library) using well known techniques. Within such techniques, a library (cDNA or genomic) is screened using one or more polynucleotide probes or primers suitable for amplification. Preferably, a library is size-selected to include larger molecules. Random primed libraries may also be preferred for identifying 5′ and upstream regions of genes. Genomic libraries are preferred for obtaining introns and extending 5′ sequences.

[2126] For hybridization techniques, a partial sequence may be labeled (e.g., by nick-translation or end-labeling with ³²P) using well known techniques. A bacterial or bacteriophage library is then generally screened by hybridizing filters containing denatured bacterial colonies (or lawns containing phage plaques) with the labeled probe (see Sambrook et al., Molecular Cloning: A Laboratory Manual, Cold Spring Harbor Laboratories, Cold Spring Harbor, N.Y., 1989). Hybridizing colonies or plaques are selected and expanded, and the DNA is isolated for further analysis. cDNA clones may be analyzed to determine the amount of additional sequence by, for example, PCR using a primer from the partial sequence and a primer from the vector. Restriction maps and partial sequences may be generated to identify one or more overlapping clones. The complete sequence may then be determined using standard techniques, which may involve generating a series of deletion clones. The resulting overlapping sequences can then assembled into a single contiguous sequence. A full length cDNA molecule can be generated by ligating suitable fragments, using well known techniques.

[2127] Alternatively, amplification techniques, such as those described above, can be useful for obtaining a full length coding sequence from a partial cDNA sequence. One such amplification technique is inverse PCR (see Triglia et al., Nucl. Acids Res. 16:8186, 1988), which uses restriction enzymes to generate a fragment in the known region of the gene. The fragment is then circularized by intramolecular ligation and used as a template for PCR with divergent primers derived from the known region. Within an alternative approach, sequences adjacent to a partial sequence may be retrieved by amplification with a primer to a linker sequence and a primer specific to a known region. The amplified sequences are typically subjected to a second round of amplification with the same linker primer and a second primer specific to the known region. A variation on this procedure, which employs two primers that initiate extension in opposite directions from the known sequence, is described in WO 96/38591. Another such technique is known as “rapid amplification of cDNA ends” or RACE. This technique involves the use of an internal primer and an external primer, which hybridizes to a polyA region or vector sequence, to identify sequences that are 5′ and 3′ of a known sequence. Additional techniques include capture PCR (Lagerstrom et al., PCR Methods Applic. 1:111-19, 1991) and walking PCR (Parker et al., Nucl. Acids. Res. 19:3055-60, 1991). Other methods employing amplification may also be employed to obtain a full length cDNA sequence.

[2128] In certain instances, it is possible to obtain a full length cDNA sequence by analysis of sequences provided in an expressed sequence tag (EST) database, such as that available from GenBank. Searches for overlapping ESTs may generally be performed using well known programs (e.g., NCBI BLAST searches), and such ESTs may be used to generate a contiguous full length sequence. Full length DNA sequences may also be obtained by analysis of genomic fragments.

[2129] In other embodiments of the invention, polynucleotide sequences or fragments thereof which encode polypeptides of the invention, or fusion proteins or functional equivalents thereof, may be used in recombinant DNA molecules to direct expression of a polypeptide in appropriate host cells. Due to the inherent degeneracy of the genetic code, other DNA sequences that encode substantially the same or a functionally equivalent amino acid sequence may be produced and these sequences may be used to clone and express a given polypeptide.

[2130] As will be understood by those of skill in the art, it may be advantageous in some instances to produce polypeptide-encoding nucleotide sequences possessing non-naturally occurring codons. For example, codons preferred by a particular prokaryotic or eukaryotic host can be selected to increase the rate of protein expression or to produce a recombinant RNA transcript having desirable properties, such as a half-life which is longer than that of a transcript generated from the naturally occurring sequence.

[2131] Moreover, the polynucleotide sequences of the present invention can be engineered using methods generally known in the art in order to alter polypeptide encoding sequences for a variety of reasons, including but not limited to, alterations which modify the cloning, processing, and/or expression of the gene product. For example, DNA shuffling by random fragmentation and PCR reassembly of gene fragments and synthetic oligonucleotides may be used to engineer the nucleotide sequences. In addition, site-directed mutagenesis may be used to insert new restriction sites, alter glycosylation patterns, change codon preference, produce splice variants, or introduce mutations, and so forth.

[2132] In another embodiment of the invention, natural, modified, or recombinant nucleic acid sequences may be ligated to a heterologous sequence to encode a fusion protein. For example, to screen peptide libraries for inhibitors of polypeptide activity, it may be useful to encode a chimeric protein that can be recognized by a commercially available antibody. A fusion protein may also be engineered to contain a cleavage site located between the polypeptide-encoding sequence and the heterologous protein sequence, so that the polypeptide may be cleaved and purified away from the heterologous moiety.

[2133] Sequences encoding a desired polypeptide may be synthesized, in whole or in part, using chemical methods well known in the art (see Caruthers, M. H. et al. (1980) Nucl. Acids Res. Symp. Ser. 215-223, Horn, T. et al. (1980) Nucl. Acids Res. Symp. Ser. 225-232). Alternatively, the protein itself may be produced using chemical methods to synthesize the amino acid sequence of a polypeptide, or a portion thereof. For example, peptide synthesis can be performed using various solid-phase techniques (Roberge, J. Y. et al. (1995) Science 269:202-204) and automated synthesis may be achieved, for example, using the ABI 431A Peptide Synthesizer (Perkin Elmer, Palo Alto, Calif.).

[2134] A newly synthesized peptide may be substantially purified by preparative high performance liquid chromatography (e.g., Creighton, T. (1983) Proteins, Structures and Molecular Principles, W H Freeman and Co., New York, N.Y.) or other comparable techniques available in the art. The composition of the synthetic peptides may be confirmed by amino acid analysis or sequencing (e.g., the Edman degradation procedure). Additionally, the amino acid sequence of a polypeptide, or any part thereof, may be altered during direct synthesis and/or combined using chemical methods with sequences from other proteins, or any part thereof, to produce a variant polypeptide.

[2135] In order to express a desired polypeptide, the nucleotide sequences encoding the polypeptide, or functional equivalents, may be inserted into appropriate expression vector, i.e., a vector which contains the necessary elements for the transcription and translation of the inserted coding sequence. Methods which are well known to those skilled in the art may be used to construct expression vectors containing sequences encoding a polypeptide of interest and appropriate transcriptional and translational control elements. These methods include in vitro recombinant DNA techniques, synthetic techniques, and in vivo genetic recombination. Such techniques are described, for example, in Sambrook, J. et al. (1989) Molecular Cloning, A Laboratory Manual, Cold Spring Harbor Press, Plainview, N.Y., and Ausubel, F. M. et al. (1989) Current Protocols in Molecular Biology, John Wiley & Sons, New York. N.Y.

[2136] A variety of expression vector/host systems may be utilized to contain and express polynucleotide sequences. These include, but are not limited to, microorganisms such as bacteria transformed with recombinant bacteriophage, plasmid, or cosmid DNA expression vectors; yeast transformed with yeast expression vectors; insect cell systems infected with virus expression vectors (e.g., baculovirus); plant cell systems transformed with virus expression vectors (e.g., cauliflower mosaic virus, CaMV; tobacco mosaic virus, TMV) or with bacterial expression vectors (e.g., Ti or pBR322 plasmids); or animal cell systems.

[2137] The “control elements” or “regulatory sequences” present in an expression vector are those non-translated regions of the vector—enhancers, promoters, 5′ and 3′ untranslated regions—which interact with host cellular proteins to carry out transcription and translation. Such elements may vary in their strength and specificity. Depending on the vector system and host utilized, any number of suitable transcription and translation elements, including constitutive and inducible promoters, may be used. For example, when cloning in bacterial systems, inducible promoters such as the hybrid lacZ promoter of the pBLUESCRIPT phagemid (Stratagene, La Jolla, Calif.) or pSPORT1 plasmid (Gibco BRL, Gaithersburg, Md.) and the like may be used. In mammalian cell systems, promoters from mammalian genes or from mammalian viruses are generally preferred. If it is necessary to generate a cell line that contains multiple copies of the sequence encoding a polypeptide, vectors based on SV40 or EBV may be advantageously used with an appropriate selectable marker.

[2138] In bacterial systems, any of a number of expression vectors may be selected depending upon the use intended for the expressed polypeptide. For example, when large quantities are needed, for example for the induction of antibodies, vectors which direct high level expression of fusion proteins that are readily purified may be used. Such vectors include, but are not limited to, the multifunctional E. coli cloning and expression vectors such as pBLUESCRIPT (Stratagene), in which the sequence encoding the polypeptide of interest may be ligated into the vector in frame with sequences for the amino-terminal Met and the subsequent 7 residues of .beta.-galactosidase so that a hybrid protein is produced; pIN vectors (Van Heeke, G. and S. M. Schuster (1989) J. Biol. Chem. 264:5503-5509); and the like. pGEX Vectors (Promega, Madison, Wis.) may also be used to express foreign polypeptides as fusion proteins with glutathione S-transferase (GST). In general, such fusion proteins are soluble and can easily be purified from lysed cells by adsorption to glutathione-agarose beads followed by elution in the presence of free glutathione. Proteins made in such systems may be designed to include heparin, thrombin, or factor XA protease cleavage sites so that the cloned polypeptide of interest can be released from the GST moiety at will.

[2139] In the yeast, Saccharomyces cerevisiae, a number of vectors containing constitutive or inducible promoters such as alpha factor, alcohol oxidase, and PGH may be used. For reviews, see Ausubel et al. (supra) and Grant et al. (1987) Methods Enzymol. 153:516-544.

[2140] In cases where plant expression vectors are used, the expression of sequences encoding polypeptides may be driven by any of a number of promoters. For example, viral promoters such as the ³⁵S and 19S promoters of CaMV may be used alone or in combination with the omega leader sequence from TMV (Takamatsu, N. (1987) EMBO J. 6:307-311. Alternatively, plant promoters such as the small subunit of RUBISCO or heat shock promoters may be used (Coruzzi, G. et al. (1984) EMBO J. 3:1671-1680; Broglie, R. et al. (1984) Science 224:838-843; and Winter, J. et al. (1991) Results Probl. Cell Differ. 17:85-105). These constructs can be introduced into plant cells by direct DNA transformation or pathogen-mediated transfection. Such techniques are described in a number of generally available reviews (see, for example, Hobbs, S. or Murry, L. E. in McGraw Hill Yearbook of Science and Technology (1992) McGraw Hill, New York, N.Y.; pp. 191-196).

[2141] An insect system may also be used to express a polypeptide of interest. For example, in one such system, Autographa californica nuclear polyhedrosis virus (AcNPV) is used as a vector to express foreign genes in Spodoptera frugiperda cells or in Trichoplusia larvae. The sequences encoding the polypeptide may be cloned into a non-essential region of the virus, such as the polyhedrin gene, and placed under control of the polyhedrin promoter. Successful insertion of the polypeptide-encoding sequence will render the polyhedrin gene inactive and produce recombinant virus lacking coat protein. The recombinant viruses may then be used to infect, for example, S. frugiperda cells or Trichoplusia larvae in which the polypeptide of interest may be expressed (Engelhard, E. K. et al. (1994) Proc. Natl. Acad. Sci. 91:3224-3227).

[2142] In mammalian host cells, a number of viral-based expression systems are generally available. For example, in cases where an adenovirus is used as an expression vector, sequences encoding a polypeptide of interest may be ligated into an adenovirus transcription/translation complex consisting of the late promoter and tripartite leader sequence. Insertion in a non-essential E1 or E3 region of the viral genome may be used to obtain a viable virus which is capable of expressing the polypeptide in infected host cells (Logan, J. and Shenk, T. (1984) Proc. Natl. Acad. Sci. 81:3655-3659). In addition, transcription enhancers, such as the Rous sarcoma virus (RSV) enhancer, may be used to increase expression in mammalian host cells.

[2143] Specific initiation signals may also be used to achieve more efficient translation of sequences encoding a polypeptide of interest. Such signals include the ATG initiation codon and adjacent sequences. In cases where sequences encoding the polypeptide, its initiation codon, and upstream sequences are inserted into the appropriate expression vector, no additional transcriptional or translational control signals may be needed. However, in cases where only coding sequence, or a portion thereof, is inserted, exogenous translational control signals including the ATG initiation codon should be provided. Furthermore, the initiation codon should be in the correct reading frame to ensure translation of the entire insert. Exogenous translational elements and initiation codons may be of various origins, both natural and synthetic. The efficiency of expression may be enhanced by the inclusion of enhancers which are appropriate for the particular cell system which is used, such as those described in the literature (Scharf, D. et al. (1994) Results Probl. Cell Differ. 20:125-162).

[2144] In addition, a host cell strain may be chosen for its ability to modulate the expression of the inserted sequences or to process the expressed protein in the desired fashion. Such modifications of the polypeptide include, but are not limited to, acetylation, carboxylation, glycosylation, phosphorylation, lipidation, and acylation. Post-translational processing which cleaves a “prepro” form of the protein may also be used to facilitate correct insertion, folding and/or function. Different host cells such as CHO, COS, HeLa, MDCK, HEK293, and WI38, which have specific cellular machinery and characteristic mechanisms for such post-translational activities, may be chosen to ensure the correct modification and processing of the foreign protein.

[2145] For long-term, high-yield production of recombinant proteins, stable expression is generally preferred. For example, cell lines which stably express a polynucleotide of interest may be transformed using expression vectors which may contain viral origins of replication and/or endogenous expression elements and a selectable marker gene on the same or on a separate vector. Following the introduction of the vector, cells may be allowed to grow for 1-2 days in an enriched media before they are switched to selective media. The purpose of the selectable marker is to confer resistance to selection, and its presence allows growth and recovery of cells which successfully express the introduced sequences. Resistant clones of stably transformed cells may be proliferated using tissue culture techniques appropriate to the cell type.

[2146] Any number of selection systems may be used to recover transformed cell lines. These include, but are not limited to, the herpes simplex virus thymidine kinase (Wigler, M. et al. (1977) Cell 11:223-32) and adenine phosphoribosyltransferase (Lowy, I. et al. (1990) Cell 22:817-23) genes which can be employed in tk.sup.—or aprt.sup.—cells, respectively. Also, antimetabolite, antibiotic or herbicide resistance can be used as the basis for selection; for example, dhfr which confers resistance to methotrexate (Wigler, M. et al. (1980) Proc. Natl. Acad. Sci. 77:3567-70); npt, which confers resistance to the aminoglycosides, neomycin and G-418 (Colbere-Garapin, F. et al (1981) J. Mol. Biol. 150:1-14); and als or pat, which confer resistance to chlorsulfuron and phosphinotricin acetyltransferase, respectively (Murry, supra). Additional selectable genes have been described, for example, trpB, which allows cells to utilize indole in place of tryptophan, or hisD, which allows cells to utilize histinol in place of histidine (Hartman, S. C. and R. C. Mulligan (1988) Proc. Natl. Acad. Sci. 85:8047-51). The use of visible markers has gained popularity with such markers as anthocyanins, beta-glucuronidase and its substrate GUS, and luciferase and its substrate luciferin, being widely used not only to identify transformants, but also to quantify the amount of transient or stable protein expression attributable to a specific vector system (Rhodes, C. A. et al. (1995) Methods Mol. Biol. 55:121-131).

[2147] Although the presence/absence of marker gene expression suggests that the gene of interest is also present, its presence and expression may need to be confirmed. For example, if the sequence encoding a polypeptide is inserted within a marker gene sequence, recombinant cells containing sequences can be identified by the absence of marker gene function. Alternatively, a marker gene can be placed in tandem with a polypeptide-encoding sequence under the control of a single promoter. Expression of the marker gene in response to induction or selection usually indicates expression of the tandem gene as well.

[2148] Alternatively, host cells that contain and express a desired polynucleotide sequence may be identified by a variety of procedures known to those of skill in the art. These procedures include, but are not limited to, DNA-DNA or DNA-RNA hybridizations and protein bioassay or immunoassay techniques which include, for example, membrane, solution, or chip based technologies for the detection and/or quantification of nucleic acid or protein.

[2149] A variety of protocols for detecting and measuring the expression of polynucleotide-encoded products, using either polyclonal or monoclonal antibodies specific for the product are known in the art. Examples include enzyme-linked immunosorbent assay (ELISA), radioimmunoassay (RIA), and fluorescence activated cell sorting (FACS). A two-site, monoclonal-based immunoassay utilizing monoclonal antibodies reactive to two non-interfering epitopes on a given polypeptide may be preferred for some applications, but a competitive binding assay may also be employed. These and other assays are described, among other places, in Hampton, R. et al. (1990; Serological Methods, a Laboratory Manual, APS Press, St Paul. Minn.) and Maddox, D. E. et al. (1983; J. Exp. Med. 158:1211-1216).

[2150] A wide variety of labels and conjugation techniques are known by those skilled in the art and may be used in various nucleic acid and amino acid assays. Means for producing labeled hybridization or PCR probes for detecting sequences related to polynucleotides include oligolabeling, nick translation, end-labeling or PCR amplification using a labeled nucleotide. Alternatively, the sequences, or any portions thereof may be cloned into a vector for the production of an mRNA probe. Such vectors are known in the art, are commercially available, and may be used to synthesize RNA probes in vitro by addition of an appropriate RNA polymerase such as T7, T3, or SP6 and labeled nucleotides. These procedures may be conducted using a variety of commercially available kits. Suitable reporter molecules or labels, which may be used include radionuclides, enzymes, fluorescent, chemiluminescent, or chromogenic agents as well as substrates, cofactors, inhibitors, magnetic particles, and the like.

[2151] Host cells transformed with a polynucleotide sequence of interest may be cultured under conditions suitable for the expression and recovery of the protein from cell culture. The protein produced by a recombinant cell may be secreted or contained intracellularly depending on the sequence and/or the vector used. As will be understood by those of skill in the art, expression vectors containing polynucleotides of the invention may be designed to contain signal sequences which direct secretion of the encoded polypeptide through a prokaryotic or eukaryotic cell membrane. Other recombinant constructions may be used to join sequences encoding a polypeptide of interest to nucleotide sequence encoding a polypeptide domain which will facilitate purification of soluble proteins. Such purification facilitating domains include, but are not limited to, metal chelating peptides such as histidine-tryptophan modules that allow purification on immobilized metals, protein A domains that allow purification on immobilized immunoglobulin, and the domain utilized in the FLAGS extension/affinity purification system (Immunex Corp., Seattle, Wash.). The inclusion of cleavable linker sequences such as those specific for Factor XA or enterokinase (Invitrogen. San Diego, Calif.) between the purification domain and the encoded polypeptide may be used to facilitate purification. One such expression vector provides for expression of a fusion protein containing a polypeptide of interest and a nucleic acid encoding 6 histidine residues preceding a thioredoxin or an enterokinase cleavage site. The histidine residues facilitate purification on IMIAC (immobilized metal ion affinity chromatography) as described in Porath, J. et al. (1992, Prot. Exp. Purif. 3:263-281) while the enterokinase cleavage site provides a means for purifying the desired polypeptide from the fusion protein. A discussion of vectors which contain fusion proteins is provided in Kroll, D. J. et al. (1993; DNA Cell Biol. 12:441-453).

[2152] In addition to recombinant production methods, polypeptides of the invention, and fragments thereof, may be produced by direct peptide synthesis using solid-phase techniques (Merrifield J. (1963) J. Am. Chem. Soc. 85:2149-2154). Protein synthesis may be performed using manual techniques or by automation. Automated synthesis may be achieved, for example, using Applied Biosystems 431A Peptide Synthesizer (Perkin Elmer). Alternatively, various fragments may be chemically synthesized separately and combined using chemical methods to produce the full length molecule.

[2153] Antibody Compositions, Fragments Thereof and Other Binding Agents

[2154] According to another aspect, the present invention further provides binding agents, such as antibodies and antigen-binding fragments thereof, that exhibit immunological binding to a tumor polypeptide disclosed herein, or to a portion, variant or derivative thereof. An antibody, or antigen-binding fragment thereof, is said to “specifically bind,” “immunogically bind,” and/or is “immunologically reactive” to a polypeptide of the invention if it reacts at a detectable level (within, for example, an ELISA assay) with the polypeptide, and does not react detectably with unrelated polypeptides under similar conditions.

[2155] Immunological binding, as used in this context, generally refers to the non-covalent interactions of the type which occur between an immunoglobulin molecule and an antigen for which the immunoglobulin is specific. The strength, or affinity of immunological binding interactions can be expressed in terms of the dissociation constant (K_{d}) of the interaction, wherein a smaller K_{d} represents a greater affinity. Immunological binding properties of selected polypeptides can be quantified using methods well known in the art. One such method entails measuring the rates of antigen-binding site/antigen complex formation and dissociation, wherein those rates depend on the concentrations of the complex partners, the affinity of the interaction, and on geometric parameters that equally influence the rate in both directions. Thus, both the “on rate constant” (Kₒₙ) and the “off rate constant” (K_{off}) can be determined by calculation of the concentrations and the actual rates of association and dissociation. The ratio of K_{off}/Kon enables cancellation of all parameters not related to affinity, and is thus equal to the dissociation constant K_{d}. See, generally, Davies et al. (1990) Annual Rev. Biochem. 59:439-473.

[2156] An “antigen-binding site,” or “binding portion” of an antibody refers to the part of the immunoglobulin molecule that participates in antigen binding. The antigen binding site is formed by amino acid residues of the N-terminal variable (“V”) regions of the heavy (“H”) and light (“L”) chains. Three highly divergent stretches within the V regions of the heavy and light chains are referred to as “hypervariable regions” which are interposed between more conserved flanking stretches known as “framework regions,” or “FRs”. Thus the term “FR” refers to amino acid sequences which are naturally found between and adjacent to hypervariable regions in immunoglobulins. In an antibody molecule, the three hypervariable regions of a light chain and the three hypervariable regions of a heavy chain are disposed relative to each other in three dimensional space to form an antigen-binding surface. The antigen-binding surface is complementary to the three-dimensional surface of a bound antigen, and the three hypervariable regions of each of the heavy and light chains are referred to as “complementarity-determining regions,” or “CDRs.”

[2157] Binding agents may be further capable of differentiating between patients with and without a cancer, such as colon cancer, using the representative assays provided herein. For example, antibodies or other binding agents that bind to a tumor protein will preferably generate a signal indicating the presence of a cancer in at least about 20% of patients with the disease, more preferably at least about 30% of patients. Alternatively, or in addition, the antibody will generate a negative signal indicating the absence of the disease in at least about 90% of individuals without the cancer. To determine whether a binding agent satisfies this requirement, biological samples (e.g., blood, sera, sputum, urine and/or tumor biopsies) from patients with and without a cancer (as determined using standard clinical tests) may be assayed as described herein for the presence of polypeptides that bind to the binding agent. Preferably, a statistically significant number of samples with and without the disease will be assayed. Each binding agent should satisfy the above criteria; however, those of ordinary skill in the art will recognize that binding agents may be used in combination to improve sensitivity.

[2158] Any agent that satisfies the above requirements may be a binding agent. For example, a binding agent may be a ribosome, with or without a peptide component, an RNA molecule or a polypeptide. In a preferred embodiment, a binding agent is an antibody or an antigen-binding fragment thereof. Antibodies may be prepared by any of a variety of techniques known to those of ordinary skill in the art. See, e.g., Harlow and Lane, Antibodies: A Laboratory Manual, Cold Spring Harbor Laboratory, 1988. In general, antibodies can be produced by cell culture techniques, including the generation of monoclonal antibodies as described herein, or via transfection of antibody genes into suitable bacterial or mammalian cell hosts, in order to allow for the production of recombinant antibodies. In one technique, an immunogen comprising the polypeptide is initially injected into any of a wide variety of mammals (e.g., mice, rats, rabbits, sheep or goats). In this step, the polypeptides of this invention may serve as the immunogen without modification. Alternatively, particularly for relatively short polypeptides, a superior immune response may be elicited if the polypeptide is joined to a carrier protein, such as bovine serum albumin or keyhole limpet hemocyanin. The immunogen is injected into the animal host, preferably according to a predetermined schedule incorporating one or more booster immunizations, and the animals are bled periodically. Polyclonal antibodies specific for the polypeptide may then be purified from such antisera by, for example, affinity chromatography using the polypeptide coupled to a suitable solid support.

[2159] Monoclonal antibodies specific for an antigenic polypeptide of interest may be prepared, for example, using the technique of Kohler and Milstein, Eur. J. Immunol. 6:511-519, 1976, and improvements thereto. Briefly, these methods involve the preparation of immortal cell lines capable of producing antibodies having the desired specificity (i.e., reactivity with the polypeptide of interest). Such cell lines may be produced, for example, from spleen cells obtained from an animal immunized as described above. The spleen cells are then immortalized by, for example, fusion with a myeloma cell fusion partner, preferably one that is syngeneic with the immunized animal. A variety of fusion techniques may be employed. For example, the spleen cells and myeloma cells may be combined with a nonionic detergent for a few minutes and then plated at low density on a selective medium that supports the growth of hybrid cells, but not myeloma cells. A preferred selection technique uses HAT (hypoxanthine, aminopterin, thymidine) selection. After a sufficient time, usually about 1 to 2 weeks, colonies of hybrids are observed. Single colonies are selected and their culture supernatants tested for binding activity against the polypeptide. Hybridomas having high reactivity and specificity are preferred.

[2160] Monoclonal antibodies may be isolated from the supernatants of growing hybridoma colonies. In addition, various techniques may be employed to enhance the yield, such as injection of the hybridoma cell line into the peritoneal cavity of a suitable vertebrate host, such as a mouse. Monoclonal antibodies may then be harvested from the ascites fluid or the blood. Contaminants may be removed from the antibodies by conventional techniques, such as chromatography, gel filtration, precipitation, and extraction. The polypeptides of this invention may be used in the purification process in, for example, an affinity chromatography step.

[2161] A number of therapeutically useful molecules are known in the art which comprise antigen-binding sites that are capable of exhibiting immunological binding properties of an antibody molecule. The proteolytic enzyme papain preferentially cleaves IgG molecules to yield several fragments, two of which (the “F(ab)” fragments) each comprise a covalent heterodimer that includes an intact antigen-binding site. The enzyme pepsin is able to cleave IgG molecules to provide several fragments, including the “F(ab′)₂” fragment which comprises both antigen-binding sites. An “Fv” fragment can be produced by preferential proteolytic cleavage of an IgM, and on rare occasions IgG or IgA immunoglobulin molecule. Fv fragments are, however, more commonly derived using recombinant techniques known in the art. The Fv fragment includes a non-covalent V_{H}::V_{L} heterodimer including an antigen-binding site which retains much of the antigen recognition and binding capabilities of the native antibody molecule. Inbar et al. (1972) Proc. Nat. Acad. Sci. USA 69:2659-2662; Hochman et al. (1976) Biochem 15:2706-2710; and Ehrlich et al. (1980) Biochem 19:4091-4096.

[2162] A single chain Fv (“sFv”) polypeptide is a covalently linked V_{H}::V_{L} heterodimer which is expressed from a gene fusion including V_{H}—and V_{L}-encoding genes linked by a peptide-encoding linker. Huston et al. (1988) Proc. Nat. Acad. Sci. USA 85(16):5879-5883. A number of methods have been described to discern chemical structures for converting the naturally aggregated—but chemically separated—light and heavy polypeptide chains from an antibody V region into an sFv molecule which will fold into a three dimensional structure substantially similar to the structure of an antigen-binding site. See, e.g., U.S. Pat. Nos. 5,091,513 and 5,132,405, to Huston et al.; and U.S. Pat. No. 4,946,778, to Ladner et al.

[2163] Each of the above-described molecules includes a heavy chain and a light chain CDR set, respectively interposed between a heavy chain and a light chain FR set which provide support to the CDRS and define the spatial relationship of the CDRs relative to each other. As used herein, the term “CDR set” refers to the three hypervariable regions of a heavy or light chain V region. Proceeding from the N-terminus of a heavy or light chain, these regions are denoted as “CDR1,” “CDR2,” and “CDR3” respectively. An antigen-binding site, therefore, includes six CDRs, comprising the CDR set from each of a heavy and a light chain V region. A polypeptide comprising a single CDR, (e.g., a CDR1, CDR2 or CDR3) is referred to herein as a “molecular recognition unit.” Crystallographic analysis of a number of antigen-antibody complexes has demonstrated that the amino acid residues of CDRs form extensive contact with bound antigen, wherein the most extensive antigen contact is with the heavy chain CDR3. Thus, the molecular recognition units are primarily responsible for the specificity of an antigen-binding site.

[2164] As used herein, the term “FR set” refers to the four flanking amino acid sequences which frame the CDRs of a CDR set of a heavy or light chain V region. Some FR residues may contact bound antigen; however, FRs are primarily responsible for folding the V region into the antigen-binding site, particularly the FR residues directly adjacent to the CDRS. Within FRs, certain amino residues and certain structural features are very highly conserved. In this regard, all V region sequences contain an internal disulfide loop of around 90 amino acid residues. When the V regions fold into a binding-site, the CDRs are displayed as projecting loop motifs which form an antigen-binding surface. It is generally recognized that there are conserved structural regions of FRs which influence the folded shape of the CDR loops into certain “canonical” structures—regardless of the precise CDR amino acid sequence. Further, certain FR residues are known to participate in non-covalent interdomain contacts which stabilize the interaction of the antibody heavy and light chains.

[2165] A number of “humanized” antibody molecules comprising an antigen-binding site derived from a non-human immunoglobulin have been described, including chimeric antibodies having rodent V regions and their associated CDRs fused to human constant domains (Winter et al. (1991) Nature 349:293-299; Lobuglio et al. (1989) Proc. Nat. Acad. Sci. USA 86:4220-4224; Shaw et al. (1987) J lmmunol. 138:4534-4538; and Brown et al. (1987) Cancer Res. 47:3577-3583), rodent CDRs grafted into a human supporting FR prior to fusion With an appropriate human antibody constant domain (Riechmann et al. (1988) Nature 332:323-327; Verhoeyen et al. (1988) Science 239:1534-1536; and Jones et al. (1986) Nature 321:522-525), and rodent CDRs supported by recombinantly veneered rodent FRs (European Patent Publication No. 519,596, published Dec. 23, 1992). These “humanized” molecules are designed to minimize unwanted immunological response toward rodent antihuman antibody molecules which limits the duration and effectiveness of therapeutic applications of those moieties in human recipients.

[2166] As used herein, the terms “veneered FRs” and “recombinantly veneered FRs” refer to the selective replacement of FR residues from, e.g., a rodent heavy or light chain V region, with human FR residues in order to provide a xenogeneic molecule comprising an antigen-binding site which retains substantially all of the native FR polypeptide folding structure. Veneering techniques are based on the understanding that the ligand binding characteristics of an antigen-binding site are determined primarily by the structure and relative disposition of the heavy and light chain CDR sets within the antigen-binding surface. Davies et al. (1990) Ann. Rev. Biochem. 59:439-473. Thus, antigen binding specificity can be preserved in a humanized antibody only wherein the CDR structures, their interaction with each other, and their interaction with the rest of the V region domains are carefully maintained. By using veneering techniques, exterior (e.g., solvent-accessible) FR residues which are readily encountered by the immune system are selectively replaced with human residues to provide a hybrid molecule that comprises either a weakly immunogenic, or substantially non-immunogenic veneered surface.

[2167] The process of veneering makes use of the available sequence data for human antibody variable domains compiled by Kabat et al., in Sequences of Proteins of Immunological Interest, 4th ed., (U.S. Dept. of Health and Human Services, U.S. Government Printing Office, 1987), updates to the Kabat database, and other accessible U.S. and foreign databases (both nucleic acid and protein). Solvent accessibilities of V region amino acids can be deduced from the known three-dimensional structure for human and murine antibody fragments. There are two general steps in veneering a murine antigen-binding site. Initially, the FRs of the variable domains of an antibody molecule of interest are compared with corresponding FR sequences of human variable domains obtained from the above-identified sources. The most homologous human V regions are then compared residue by residue to corresponding murine amino acids. The residues in the murine FR which differ from the human counterpart are replaced by the residues present in the human moiety using recombinant techniques well known in the art. Residue switching is only carried out with moieties which are at least partially exposed (solvent accessible), and care is exercised in the replacement of amino acid residues which may have a significant effect on the tertiary structure of V region domains, such as proline, glycine and charged amino acids.

[2168] In this manner, the resultant “veneered” murine antigen-binding sites are thus designed to retain the murine CDR residues, the residues substantially adjacent to the CDRs, the residues identified as buried or mostly buried (solvent inaccessible), the residues believed to participate in non-covalent (e.g., electrostatic and hydrophobic) contacts between heavy and light chain domains, and the residues from conserved structural regions of the FRs which are believed to influence the “canonical” tertiary structures of the CDR loops. These design criteria are then used to prepare recombinant nucleotide sequences which combine the CDRs of both the heavy and light chain of a murine antigen-binding site into human-appearing FRs that can be used to transfect mammalian cells for the expression of recombinant human antibodies which exhibit the antigen specificity of the murine antibody molecule.

[2169] In another embodiment of the invention, monoclonal antibodies of the present invention may be coupled to one or more therapeutic agents. Suitable agents in this regard include radionuclides, differentiation inducers, drugs, toxins, and derivatives thereof. Preferred radionuclides include ⁹⁰Y, ¹²³I, ¹²⁵I, ¹³¹I, ¹⁸⁶Re, ¹⁸⁸Re, ²¹¹At, and ²¹²Bi. Preferred drugs include methotrexate, and pyrimidine and purine analogs. Preferred differentiation inducers include phorbol esters and butyric acid. Preferred toxins include ricin, abrin, diptheria toxin, cholera toxin, gelonin, Pseudomonas exotoxin, Shigella toxin, and pokeweed antiviral protein.

[2170] A therapeutic agent may be coupled (e.g., covalently bonded) to a suitable monoclonal antibody either directly or indirectly (e.g., via a linker group). A direct reaction between an agent and an antibody is possible when each possesses a substituent capable of reacting with the other. For example, a nucleophilic group, such as an amino or sulfhydryl group, on one may be capable of reacting with a carbonyl-containing group, such as an anhydride or an acid halide, or with an alkyl group containing a good leaving group (e.g., a halide) on the other.

[2171] Alternatively, it may be desirable to couple a therapeutic agent and an antibody via a linker group. A linker group can function as a spacer to distance an antibody from an agent in order to avoid interference with binding capabilities. A linker group can also serve to increase the chemical reactivity of a substituent on an agent or an antibody, and thus increase the coupling efficiency. An increase in chemical reactivity may also facilitate the use of agents, or functional groups on agents, which otherwise would not be possible.

[2172] It will be evident to those skilled in the art that a variety of bifunctional or polyfunctional reagents, both homo- and hetero-functional (such as those described in the catalog of the Pierce Chemical Co., Rockford, Ill.), may be employed as the linker group. Coupling may be effected, for example, through amino groups, carboxyl groups, sulfhydryl groups or oxidized carbohydrate residues. There are numerous references describing such methodology, e.g., U.S. Pat. No. 4,671,958, to Rodwell et al.

[2173] Where a therapeutic agent is more potent when free from the antibody portion of the immunoconjugates of the present invention, it may be desirable to use a linker group which is cleavable during or upon internalization into a cell. A number of different cleavable linker groups have been described. The mechanisms for the intracellular release of an agent from these linker groups include cleavage by reduction of a disulfide bond (e.g., U.S. Pat. No. 4,489,710, to Spitler), by irradiation of a photolabile bond (e.g., U.S. Pat. No. 4,625,014, to Senter et al.), by hydrolysis of derivatized amino acid side chains (e.g., U.S. Pat. No. 4,638,045, to Kohn et al.), by serum complement-mediated hydrolysis (e.g., U.S. Pat. No. 4,671,958, to Rodwell et al.), and acid-catalyzed hydrolysis (e.g., U.S. Pat. No. 4,569,789, to Blattler et al.).

[2174] It may be desirable to couple more than one agent to an antibody. In one embodiment, multiple molecules of an agent are coupled to one antibody molecule. In another embodiment, more than one type of agent may be coupled to one antibody. Regardless of the particular embodiment, immunoconjugates with more than one agent may be prepared in a variety of ways. For example, more than one agent may be coupled directly to an antibody molecule, or linkers that provide multiple sites for attachment can be used. Alternatively, a carrier can be used.

[2175] A carrier may bear the agents in a variety of ways, including covalent bonding either directly or via a linker group. Suitable carriers include proteins such as albumins (e.g., U.S. Pat. No. 4,507,234, to Kato et al.), peptides and polysaccharides such as aminodextran (e.g., U.S. Pat. No. 4,699,784, to Shih et al.). A carrier may also bear an agent by noncovalent bonding or by encapsulation, such as within a liposome vesicle (e.g., U.S. Pat. Nos. 4,429,008 and 4,873,088). Carriers specific for radionuclide agents include radiohalogenated small molecules and chelating compounds. For example, U.S. Pat. No. 4,735,792 discloses representative radiohalogenated small molecules and their synthesis. A radionuclide chelate may be formed from chelating compounds that include those containing nitrogen and sulfur atoms as the donor atoms for binding the metal, or metal oxide, radionuclide. For example, U.S. Pat. No. 4,673,562, to Davison et al. discloses representative chelating compounds and their synthesis.

[2176] T Cell Compositions

[2177] The present invention, in another aspect, provides T cells specific for a tumor polypeptide disclosed herein, or for a variant or derivative thereof. Such cells may generally be prepared in vitro or ex vivo, using standard procedures. For example, T cells may be isolated from bone marrow, peripheral blood, or a fraction of bone marrow or peripheral blood of a patient, using a commercially available cell separation system, such as the lsolex™ System, available from Nexell Therapeutics, Inc. (Irvine, Calif.; see also U.S. Pat. No. 5,240,856; U.S. Pat. No. 5,215,926; WO 89/06280; WO 91/16116 and WO 92/07243). Alternatively, T cells may be derived from related or unrelated humans, non-human mammals, cell lines or cultures.

[2178] T cells may be stimulated with a polypeptide, polynucleotide encoding a polypeptide and/or an antigen presenting cell (APC) that expresses such a polypeptide. Such stimulation is performed under conditions and for a time sufficient to permit the generation of T cells that are specific for the polypeptide of interest. Preferably, a tumor polypeptide or polynucleotide of the invention is present within a delivery vehicle, such as a microsphere, to facilitate the generation of specific T cells.

[2179] T cells are considered to be specific for a polypeptide of the present invention if the T cells specifically proliferate, secrete cytokines or kill target cells coated with the polypeptide or expressing a gene encoding the polypeptide. T cell specificity may be evaluated using any of a variety of standard techniques. For example, within a chromium release assay or proliferation assay, a stimulation index of more than two fold increase in lysis and/or proliferation, compared to negative controls, indicates T cell specificity. Such assays may be performed, for example, as described in Chen et al., Cancer Res. 54:1065-1070, 1994. Alternatively, detection of the proliferation of T cells may be accomplished by a variety of known techniques. For example, T cell proliferation can be detected by measuring an increased rate of DNA synthesis (e.g., by pulse-labeling cultures of T cells with tritiated thymidine and measuring the amount of tritiated thymidine incorporated into DNA). Contact with a tumor polypeptide (100 ng/ml-100 μg/ml, preferably 200 ng/ml-25 μg/ml) for 3-7 days will typically result in at least a two fold increase in proliferation of the T cells. Contact as described above for 2-3 hours should result in activation of the T cells, as measured using standard cytokine assays in which a two fold increase in the level of cytokine release (e.g., TNF or IFN-γ) is indicative of T cell activation (see Coligan et al., Current Protocols in Immunology, vol. 1, Wiley Interscience (Greene 1998)). T cells that have been activated in response to a tumor polypeptide, polynucleotide or polypeptide-expressing APC may be CD4⁺ and/or CD8⁺. Tumor polypeptide-specific T cells may be expanded using standard techniques. Within preferred embodiments, the T cells are derived from a patient, a related donor or an unrelated donor, and are administered to the patient following stimulation and expansion.

[2180] For therapeutic purposes, CD4⁺ or CD8⁺ T cells that proliferate in response to a tumor polypeptide, polynucleotide or APC can be expanded in number either in vitro or in vivo. Proliferation of such T cells in vitro may be accomplished in a variety of ways. For example, the T cells can be re-exposed to a tumor polypeptide, or a short peptide corresponding to an immunogenic portion of such a polypeptide, with or without the addition of T cell growth factors, such as interleukin-2, and/or stimulator cells that synthesize a tumor polypeptide. Alternatively, one or more T cells that proliferate in the presence of the tumor polypeptide can be expanded in number by cloning. Methods for cloning cells are well known in the art, and include limiting dilution.

[2181] T Cell Receptor Compositions

[2182] The T cell receptor (TCR) consists of 2 different, highly variable polypeptide chains, termed the T-cell receptor α and β chains, that are linked by a disulfide bond (Janeway, Travers, Walport. Immunobiology. Fourth Ed., 148-159. Elsevier Science Ltd/Garland Publishing. 1999). The α/β heterodimer complexes with the invariant CD3 chains at the cell membrane. This complex recognizes specific antigenic peptides bound to MHC molecules. The enormous diversity of TCR specificities is generated much like immunoglobulin diversity, through somatic gene rearrangement. The β chain genes contain over 50 variable (V), 2 diversity (D), over 10 joining (J) segments, and 2 constant region segments (C). The a chain genes contain over 70 V segments, and over 60 J segments but no D segments, as well as one C segment. During T cell development in the thymus, the D to J gene rearrangement of the β chain occurs, followed by the V gene segment rearrangement to the DJ. This functional VDJ_{β} exon is transcribed and spliced to join to a C_{β}. For the a chain, a V_{α} gene segment rearranges to a J_{α} gene segment to create the functional exon that is then transcribed and spliced to the C_{α}. Diversity is further increased during the recombination process by the random addition of P and N-nucleotides between the V, D, and J segments of the β chain and between the V and J segments in the a chain (Janeway, Travers, Walport. Immunobiology. Fourth Ed., 98 and 150. Elsevier Science Ltd/Garland Publishing. 1999).

[2183] The present invention, in another aspect, provides TCRs specific for a polypeptide disclosed herein, or for a variant or derivative thereof. In accordance with the present invention, polynucleotide and amino acid sequences are provided for the V-J or V-D-J junctional regions or parts thereof for the alpha and beta chains of the T-cell receptor which recognize tumor polypeptides described herein. In general, this aspect of the invention relates to T-cell receptors which recognize or bind tumor polypeptides presented in the context of MHC. In a preferred embodiment the tumor antigens recognized by the T-cell receptors comprise a polypeptide of the present invention. For example, cDNA encoding a TCR specific for a colon tumor peptide can be isolated from T cells specific for a tumor polypeptide using standard molecular biological and recombinant DNA techniques.

[2184] This invention further includes the T-cell receptors or analogs thereof having substantially the same function or activity as the T-cell receptors of this invention which recognize or bind tumor polypeptides. Such receptors include, but are not limited to, a fragment of the receptor, or a substitution, addition or deletion mutant of a T-cell receptor provided herein. This invention also encompasses polypeptides or peptides that are substantially homologous to the T-cell receptors provided herein or that retain substantially the same activity. The term “analog” includes any protein or polypeptide having an amino acid residue sequence substantially identical to the T-cell receptors provided herein in which one or more residues, preferably no more than 5 residues, more preferably no more than 25 residues have been conservatively substituted with a functionally similar residue and which displays the functional aspects of the T-cell receptor as described herein.

[2185] The present invention further provides for suitable mammalian host cells, for example, non-specific T cells, that are transfected with a polynucleotide encoding TCRs specific for a polypeptide described herein, thereby rendering the host cell specific for the polypeptide. The α and β chains of the TCR may be contained on separate expression vectors or alternatively, on a single expression vector that also contains an internal ribosome entry site (IRES) for cap-independent translation of the gene downstream of the IRES. Said host cells expressing TCRs specific for the polypeptide may be used, for example, for adoptive immunotherapy of colon cancer as discussed further below.

[2186] In further aspects of the present invention, cloned TCRs specific for a polypeptide recited herein may be used in a kit for the diagnosis of colon cancer. For example, the nucleic acid sequence or portions thereof, of tumor-specific TCRs can be used as probes or primers for the detection of expression of the rearranged genes encoding the specific TCR in a biological sample. Therefore, the present invention further provides for an assay for detecting messenger RNA or DNA encoding the TCR specific for a polypeptide.

[2187] Pharmaceutical Compositions

[2188] In additional embodiments, the present invention concerns formulation of one or more of the polynucleotide, polypeptide, T-cell, TCR, and/or antibody compositions disclosed herein in pharmaceutically-acceptable carriers for administration to a cell or an animal, either alone, or in combination with one or more other modalities of therapy.

[2189] It will be understood that, if desired, a composition as disclosed herein may be administered in combination with other agents as well, such as, e.g., other proteins or polypeptides or various pharmaceutically-active agents. In fact, there is virtually no limit to other components that may also be included, given that the additional agents do not cause a significant adverse effect upon contact with the target cells or host tissues. The compositions may thus be delivered along with various other agents as required in the particular instance. Such compositions may be purified from host cells or other biological sources, or alternatively may be chemically synthesized as described herein. Likewise, such compositions may further comprise substituted or derivatized RNA or DNA compositions.

[2190] Therefore, in another aspect of the present invention, pharmaceutical compositions are provided comprising one or more of the polynucleotide, polypeptide, antibody, TCR, and/or T-cell compositions described herein in combination with a physiologically acceptable carrier. In certain preferred embodiments, the pharmaceutical compositions of the invention comprise immunogenic polynucleotide and/or polypeptide compositions of the invention for use in prophylactic and theraputic vaccine applications. Vaccine preparation is generally described in, for example, M. F. Powell and M. J. Newman, eds., “Vaccine Design (the subunit and adjuvant approach),” Plenum Press (NY, 1995). Generally, such compositions will comprise one or more polynucleotide and/or polypeptide compositions of the present invention in combination with one or more immunostimulants.

[2191] It will be apparent that any of the pharmaceutical compositions described herein can contain pharmaceutically acceptable salts of the polynucleotides and polypeptides of the invention. Such salts can be prepared, for example, from pharmaceutically acceptable non-toxic bases, including organic bases (e.g., salts of primary, secondary and tertiary amines and basic amino acids) and inorganic bases (e.g., sodium, potassium, lithium, ammonium, calcium and magnesium salts).

[2192] In another embodiment, illustrative immunogenic compositions, e.g., vaccine compositions, of the present invention comprise DNA encoding one or more of the polypeptides as described above, such that the polypeptide is generated in situ. As noted above, the polynucleotide may be administered within any of a variety of delivery systems known to those of ordinary skill in the art. Indeed, numerous gene delivery techniques are well known in the art, such as those described by Rolland, Crit. Rev. Therap. Drug Carrier Systems 15:143-198, 1998, and references cited therein. Appropriate polynucleotide expression systems will, of course, contain the necessary regulatory DNA regulatory sequences for expression in a patient (such as a suitable promoter and terminating signal). Alternatively, bacterial delivery systems may involve the administration of a bacterium (such as Bacillus-Calmette-Guerrin) that expresses an immunogenic portion of the polypeptide on its cell surface or secretes such an epitope.

[2193] Therefore, in certain embodiments, polynucleotides encoding immunogenic polypeptides described herein are introduced into suitable mammalian host cells for expression using any of a number of known viral-based systems. In one illustrative embodiment, retroviruses provide a convenient and effective platform for gene delivery systems. A selected nucleotide sequence encoding a polypeptide of the present invention can be inserted into a vector and packaged in retroviral particles using techniques known in the art. The recombinant virus can then be isolated and delivered to a subject. A number of illustrative retroviral systems have been described (e.g., U.S. Pat. No. 5,219,740; Miller and Rosman (1989) BioTechniques 7:980-990; Miller, A. D. (1990) Human Gene Therapy 1:5-14; Scarpa et al. (1991) Virology 180:849-852; Burns et al. (1993) Proc. Natl. Acad. Sci. USA 90:8033-8037; and Boris-Lawrie and Temin (1993) Cur. Opin. Genet. Develop. 3:102-109.

[2194] In addition, a number of illustrative adenovirus-based systems have also been described. Unlike retroviruses which integrate into the host genome, adenoviruses persist extrachromosomally thus minimizing the risks associated with insertional mutagenesis (Haj-Ahmad and Graham (1986) J. Virol. 57:267-274; Bett et al. (1993) J. Virol. 67:5911-5921; Mittereder et al. (1994) Human Gene Therapy 5:717-729; Seth et al. (1994) J. Virol. 68:933-940; Barr et al. (1994) Gene Therapy 1:51-58; Berkner, K. L. (1988) BioTechniques 6:616-629; and Rich et al. (1993) Human Gene Therapy 4:461-476).

[2195] Various adeno-associated virus (AAV) vector systems have also been developed for polynucleotide delivery. MV vectors can be readily constructed using techniques well known in the art. See, e.g., U.S. Pat. Nos. 5,173,414 and 5,139,941; International Publication Nos. WO 92/01070 and WO 93/03769; Lebkowski et al. (1988) Molec. Cell. Biol. 8:3988-3996; Vincent et al. (1990) Vaccines 90 (Cold Spring Harbor Laboratory Press); Carter, B. J. (1992) Current Opinion in Biotechnology 3:533-539; Muzyczka, N. (1992) Current Topics in Microbiol. and Immunol. 158:97-129; Kotin, R. M. (1994) Human Gene Therapy 5:793-801; Shelling and Smith (1994) Gene Therapy 1:165-169; and Zhou et al. (1994) J. Exp. Med. 179:1867-1875.

[2196] Additional viral vectors useful for delivering the polynucleotides encoding polypeptides of the present invention by gene transfer include those derived from the pox family of viruses, such as vaccinia virus and avian poxvirus. By way of example, vaccinia virus recombinants expressing the novel molecules can be constructed as follows. The DNA encoding a polypeptide is first inserted into an appropriate vector so that it is adjacent to a vaccinia promoter and flanking vaccinia DNA sequences, such as the sequence encoding thymidine kinase (TK). This vector is then used to transfect cells which are simultaneously infected with vaccinia. Homologous recombination serves to insert the vaccinia promoter plus the gene encoding the polypeptide of interest into the viral genome. The resulting TK.sup.(−) recombinant can be selected by culturing the cells in the presence of 5-bromodeoxyuridine and picking viral plaques resistant thereto.

[2197] A vaccinia-based infection/transfection system can be conveniently used to provide for inducible, transient expression or coexpression of one or more polypeptides described herein in host cells of an organism. In this particular system, cells are first infected in vitro with a vaccinia virus recombinant that encodes the bacteriophage T7 RNA polymerase. This polymerase displays exquisite specificity in that it only transcribes templates bearing T7 promoters. Following infection, cells are transfected with the polynucleotide or polynucleotides of interest, driven by a T7 promoter. The polymerase expressed in the cytoplasm from the vaccinia virus recombinant transcribes the transfected DNA into RNA which is then translated into polypeptide by the host translational machinery. The method provides for high level, transient, cytoplasmic production of large quantities of RNA and its translation products. See, e.g., Elroy-Stein and Moss, Proc. Natl. Acad. Sci. USA (1990) 87:6743-6747; Fuerst et al. Proc. Natl. Acad. Sci. USA (1986) 83:8122-8126.

[2198] Alternatively, avipoxyiruses, such as the fowlpox and canarypox viruses, can also be used to deliver the coding sequences of interest. Recombinant avipox viruses, expressing immunogens from mammalian pathogens, are known to confer protective immunity when administered to non-avian species. The use of an Avipox vector is particularly desirable in human and other mammalian species since members of the Avipox genus can only productively replicate in susceptible avian species and therefore are not infective in mammalian cells. Methods for producing recombinant Avipoxyiruses are known in the art and employ genetic recombination, as described above with respect to the production of vaccinia viruses. See, e.g., WO 91/12882; WO 89/03429; and WO 92/03545.

[2199] Any of a number of alphavirus vectors can also be used for delivery of polynucleotide compositions of the present invention, such as those vectors described in U.S. Pat. Nos. 5,843,723; 6,015,686; 6,008,035 and 6,015,694. Certain vectors based on Venezuelan Equine Encephalitis (VEE) can also be used, illustrative examples of which can be found in U.S. Pat. Nos. 5,505,947 and 5,643,576.

[2200] Moreover, molecular conjugate vectors, such as the adenovirus chimeric vectors described in Michael et al. J. Biol. Chem. (1993) 268:6866-6869 and Wagner et al. Proc. Natl. Acad. Sci. USA (1992) 89:6099-6103, can also be used for gene delivery under the invention.

[2201] Additional illustrative information on these and other known viral-based delivery systems can be found, for example, in Fisher-Hoch et al., Proc. Natl. Acad. Sci. USA 86:317-321,1989; Flexner et al., Ann. N.Y. Acad. Sci. 569:86-103,1989; Flexner et al., Vaccine 8:17-21,1990; U.S. Pat. Nos. 4,603,112, 4,769,330, and 5,017,487; WO 89/01973; U.S. Pat. No. 4,777,127; GB 2,200,651; EP 0,345,242; WO 91/02805; Berkner, Biotechniques 6:616-627,1988; Rosenfeld et al., Science 252:431-434, 1991; Kolls et al., Proc. Natl. Acad. Sci. USA 91:215-219,1994; Kass-Eisler et al., Proc. Natl. Acad. Sci. USA 90:11498-11502,1993; Guzman et al., Circulation 88:2838-2848,1993; and Guzman et al., Cir. Res. 73:1202-1207,1993.

[2202] In certain embodiments, a polynucleotide may be integrated into the genome of a target cell. This integration may be in the specific location and orientation via homologous recombination (gene replacement) or it may be integrated in a random, non-specific location (gene augmentation). In yet further embodiments, the polynucleotide may be stably maintained in the cell as a separate, episomal segment of DNA. Such polynucleotide segments or “episomes” encode sequences sufficient to permit maintenance and replication independent of or in synchronization with the host cell cycle. The manner in which the expression construct is delivered to a cell and where in the cell the polynucleotide remains is dependent on the type of expression construct employed.

[2203] In another embodiment of the invention, a polynucleotide is administered/delivered as “naked” DNA, for example as described in Ulmer et al., Science 259:1745-1749,1993 and reviewed by Cohen, Science 259:1691-1692, 1993. The uptake of naked DNA may be increased by coating the DNA onto biodegradable beads, which are efficiently transported into the cells.

[2204] In still another embodiment, a composition of the present invention can be delivered via a particle bombardment approach, many of which have been described. In one illustrative example, gas-driven particle acceleration can be achieved with devices such as those manufactured by Powderject Pharmaceuticals PLC (Oxford, UK) and Powderject Vaccines Inc. (Madison, Wis.), some examples of which are described in U.S. Pat. Nos. 5,846,796; 6,010,478; 5,865,796; 5,584,807; and EP Patent No. 0500 799. This approach offers a needle-free delivery approach wherein a dry powder formulation of microscopic particles, such as polynucleotide or polypeptide particles, are accelerated to high speed within a helium gas jet generated by a hand held device, propelling the particles into a target tissue of interest.

[2205] In a related embodiment, other devices and methods that may be useful for gas-driven needle-less injection of compositions of the present invention include those provided by Bioject, Inc. (Portland, Oreg.), some examples of which are described in U.S. Pat. Nos. 4,790,824; 5,064,413; 5,312,335; 5,383,851; 5,399,163; 5,520,639 and 5,993,412.

[2206] According to another embodiment, the pharmaceutical compositions described herein will comprise one or more immunostimulants in addition to the immunogenic polynucleotide, polypeptide, antibody, T-cell, TCR, and/or APC compositions of this invention. An immunostimulant refers to essentially any substance that enhances or potentiates an immune response (antibody and/or cell-mediated) to an exogenous antigen. One preferred type of immunostimulant comprises an adjuvant. Many adjuvants contain a substance designed to protect the antigen from rapid catabolism, such as aluminum hydroxide or mineral oil, and a stimulator of immune responses, such as lipid A, Bortadella pertussis or Mycobacterium tuberculosis derived proteins. Certain adjuvants are commercially available as, for example, Freund's Incomplete Adjuvant and Complete Adjuvant (Difco Laboratories, Detroit, Mich.); Merck Adjuvant 65 (Merck and Company, Inc., Rahway, N.J.); AS-2 (SmithKline Beecham, Philadelphia, Pa.); aluminum salts such as aluminum hydroxide gel (alum) or aluminum phosphate; salts of calcium, iron or zinc; an insoluble suspension of acylated tyrosine; acylated sugars; cationically or anionically derivatized polysaccharides; polyphosphazenes; biodegradable microspheres; monophosphoryl lipid A and quil A. Cytokines, such as GM-CSF, interleukin-2, -7,-12, and other like growth factors, may also be used as adjuvants.

[2207] Within certain embodiments of the invention, the adjuvant composition is preferably one that induces an immune response predominantly of the Th1 type. High levels of Th1-type cytokines (e.g., IFN-γ, TNFα, IL-2 and IL-12) tend to favor the induction of cell mediated immune responses to an administered antigen. In contrast, high levels of Th2-type cytokines (e.g., IL-4, IL-5, IL-6 and IL-10) tend to favor the induction of humoral immune responses. Following application of a vaccine as provided herein, a patient will support an immune response that includes Th1- and Th2-type responses. Within a preferred embodiment, in which a response is predominantly Th1-type, the level of Th1-type cytokines will increase to a greater extent than the level of Th2-type cytokines. The levels of these cytokines may be readily assessed using standard assays. For a review of the families of cytokines, see Mosmann and Coffman, Ann. Rev. Immunol. 7:145-173,1989.

[2208] Certain preferred adjuvants for eliciting a predominantly Th1-type response include, for example, a combination of monophosphoryl lipid A, preferably 3-de-O-acylated monophosphoryl lipid A, together with an aluminum salt. MPL® adjuvants are available from Corixa Corporation (Seattle, Wash.; see, for example, U.S. Pat. Nos. 4,436,727; 4,877,611; 4,866,034 and 4,912,094). CpG-containing oligonucleotides (in which the CpG dinucleotide is unmethylated) also induce a predominantly Th1 response. Such oligonucleotides are well known and are described, for example, in WO 96/02555, WO 99/33488 and U.S. Pat. Nos. 6,008,200 and 5,856,462. Immunostimulatory DNA sequences are also described, for example, by Sato et al., Science 273:352, 1996. Another preferred adjuvant comprises a saponin, such as Quil A, or derivatives thereof, including QS21 and QS7 (Aquila Biopharmaceuticals Inc., Framingham, Mass.); Escin; Digitonin; or Gypsophila or Chenopodium quinoa saponins. Other preferred formulations include more than one saponin in the adjuvant combinations of the present invention, for example combinations of at least two of the following group comprising QS21, QS7, Quil A, β-escin, or digitonin.

[2209] Alternatively the saponin formulations may be combined with vaccine vehicles composed of chitosan or other polycationic polymers, polylactide and polylactide-co-glycolide particles, poly-N-acetyl glucosamine-based polymer matrix, particles composed of polysaccharides or chemically modified polysaccharides, liposomes and lipid-based particles, particles composed of glycerol monoesters, etc. The saponins may also be formulated in the presence of cholesterol to form particulate structures such as liposomes or ISCOMs. Furthermore, the saponins may be formulated together with a polyoxyethylene ether or ester, in either a non-particulate solution or suspension, or in a particulate structure such as a paucilamelar liposome or ISCOM. The saponins may also be formulated with excipients such as Carbopol® to increase viscosity, or may be formulated in a dry powder form with a powder excipient such as lactose.

[2210] In one preferred embodiment, the adjuvant system includes the combination of a monophosphoryl lipid A and a saponin derivative, such as the combination of QS21 and 3D-MPL® adjuvant, as described in WO 94/00153, or a less reactogenic composition where the QS21 is quenched with cholesterol, as described in WO 96/33739. Other preferred formulations comprise an oil-in-water emulsion and tocopherol. Another particularly preferred adjuvant formulation employing QS21, 3D-MPL® adjuvant and tocopherol in an oil-in-water emulsion is described in WO 95/17210.

[2211] Another enhanced adjuvant system involves the combination of a CpG-containing oligonucleotide and a saponin derivative particularly the combination of CpG and QS21 is disclosed in WO 00/09159. Preferably the formulation additionally comprises an oil in water emulsion and tocopherol.

[2212] Additional illustrative adjuvants for use in the pharmaceutical compositions of the invention include Montamide ISA 720 (Seppic, France), SAF (Chiron, Calif., United States), ISCOMS (CSL), MF-59 (Chiron), the SBAS series of adjuvants (e.g., SBAS-2 or SBAS-4, available from SmithKline Beecham, Rixensart, Belgium), Detox (Enhanzyn®) (Corixa, Hamilton, Mont.), RC-529 (Corixa, Hamilton, Mont.) and other aminoalkyl glucosaminide 4-phosphates (AGPs), such as those described in pending U.S. patent application Ser. Nos. 08/853,826 and 09/074,720, the disclosures of which are incorporated herein by reference in their entireties, and polyoxyethylene ether adjuvants such as those described in WO 99/52549A1.

[2213] Other preferred adjuvants include adjuvant molecules of the general formula

HO(CH₂CH₂O)ₙ-A-R, (I)

[2214] wherein, n is 1-50, A is a bond or —C(O)—, R is C₁₋₅₀ alkyl or Phenyl C₁₋₅₀ alkyl.

[2215] One embodiment of the present invention consists of a vaccine formulation comprising a polyoxyethylene ether of general formula (I), wherein n is between 1 and 50, preferably 4-24, most preferably 9; the R component is C₁₋₅₀, preferably C₄-C₂₀ alkyl and most preferably C₁₂ alkyl, and A is a bond. The concentration of the polyoxyethylene ethers should be in the range 0.1-20%, preferably from 0.1-10%, and most preferably in the range 0.1-1%. Preferred polyoxyethylene ethers are selected from the following group: polyoxyethylene-9-lauryl ether, polyoxyethylene-9-steoryl ether, polyoxyethylene-8-steoryl ether, polyoxyethylene-4-lauryl ether, polyoxyethylene-35-lauryl ether, and polyoxyethylene-23-lauryl ether. Polyoxyethylene ethers such as polyoxyethylene lauryl ether are described in the Merck index (12^{th} edition: entry 7717). These adjuvant molecules are described in WO 99/52549.

[2216] The polyoxyethylene ether according to the general formula (I) above may, if desired, be combined with another adjuvant. For example, a preferred adjuvant combination is preferably with CpG as described in the pending UK patent application GB 9820956.2.

[2217] According to another embodiment of this invention, an immunogenic composition described herein is delivered to a host via antigen presenting cells (APCs), such as dendritic cells, macrophages, B cells, monocytes and other cells that may be engineered to be efficient APCs. Such cells may, but need not, be genetically modified to increase the capacity for presenting the antigen, to improve activation and/or maintenance of the T cell response, to have anti-tumor effects per se and/or to be immunologically compatible with the receiver (i.e., matched HLA haplotype). APCs may generally be isolated from any of a variety of biological fluids and organs, including tumor and peritumoral tissues, and may be autologous, allogeneic, syngeneic or xenogeneic cells.

[2218] Certain preferred embodiments of the present invention use dendritic cells or progenitors thereof as antigen-presenting cells. Dendritic cells are highly potent APCs (Banchereau and Steinman, Nature 392:245-251,1998) and have been shown to be effective as a physiological adjuvant for eliciting prophylactic or therapeutic antitumor immunity (see Timmerman and Levy, Ann. Rev. Med. 50:507-529, 1999). In general, dendritic cells may be identified based on their typical shape (stellate in situ, with marked cytoplasmic processes (dendrites) visible in vitro), their ability to take up, process and present antigens with high efficiency and their ability to activate naive T cell responses. Dendritic cells may, of course, be engineered to express specific cell-surface receptors or ligands that are not commonly found on dendritic cells in vivo or ex vivo, and such modified dendritic cells are contemplated by the present invention. As an alternative to dendritic cells, secreted vesicles antigen-loaded dendritic cells (called exosomes) may be used within a vaccine (see Zitvogel et al., Nature Med. 4:594-600,1998).

[2219] Dendritic cells and progenitors may be obtained from peripheral blood, bone marrow, tumor-infiltrating cells, peritumoral tissues-infiltrating cells, lymph nodes, spleen, skin, umbilical cord blood or any other suitable tissue or fluid. For example, dendritic cells may be differentiated ex vivo by adding a combination of cytokines such as GM-CSF, IL-4, IL-13 and/or TNFα to cultures of monocytes harvested from peripheral blood. Alternatively, CD34 positive cells harvested from peripheral blood, umbilical cord blood or bone marrow may be differentiated into dendritic cells by adding to the culture medium combinations of GM-CSF, IL-3, TNFα, CD40 ligand, LPS, flt3 ligand and/or other compound(s) that induce differentiation, maturation and proliferation of dendritic cells.

[2220] Dendritic cells are conveniently categorized as “immature” and “mature” cells, which allows a simple way to discriminate between two well characterized phenotypes. However, this nomenclature should not be construed to exclude all possible intermediate stages of differentiation. Immature dendritic cells are characterized as APC with a high capacity for antigen uptake and processing, which correlates with the high expression of Fcy receptor and mannose receptor. The mature phenotype is typically characterized by a lower expression of these markers, but a high expression of cell surface molecules responsible for T cell activation such as class I and class II MHC, adhesion molecules (e.g., CD54 and CD11) and costimulatory molecules (e.g., CD40, CD80, CD86 and 4-1 BB).

[2221] APCs may generally be transfected with a polynucleotide of the invention (or portion or other variant thereof) such that the encoded polypeptide, or an immunogenic portion thereof, is expressed on the cell surface. Such transfection may take place ex vivo, and a pharmaceutical composition comprising such transfected cells may then be used for therapeutic purposes, as described herein. Alternatively, a gene delivery vehicle that targets a dendritic or other antigen presenting cell may be administered to a patient, resulting in transfection that occurs in vivo. In vivo and ex vivo transfection of dendritic cells, for example, may generally be performed using any methods known in the art, such as those described in WO 97/24447, or the gene gun approach described by Mahvi et al., Immunology and cell Biology 75:456-460, 1997. Antigen loading of dendritic cells may be achieved by incubating dendritic cells or progenitor cells with the tumor polypeptide, DNA (naked or within a plasmid vector) or RNA; or with antigen-expressing recombinant bacterium or viruses (e.g., vaccinia, fowlpox, adenovirus or lentivirus vectors). Prior to loading, the polypeptide may be covalently conjugated to an immunological partner that provides T cell help (e.g., a carrier molecule). Alternatively, a dendritic cell may be pulsed with a non-conjugated immunological partner, separately or in the presence of the polypeptide.

[2222] While any suitable carrier known to those of ordinary skill in the art may be employed in the pharmaceutical compositions of this invention, the type of carrier will typically vary depending on the mode of administration. Compositions of the present invention may be formulated for any appropriate manner of administration, including for example, topical, oral, nasal, mucosal, intravenous, intracranial, intraperitoneal, subcutaneous and intramuscular administration.

[2223] Carriers for use within such pharmaceutical compositions are biocompatible, and may also be biodegradable. In certain embodirnents, the formulation preferably provides a relatively constant level of active component release. In other embodiments, however, a more rapid rate of release immediately upon administration may be desired. The formulation of such compositions is well within the level of ordinary skill in the art using known techniques. Illustrative carriers useful in this regard include microparticles of poly(lactide-co-glycolide), polyacrylate, latex, starch, cellulose, dextran and the like. Other illustrative delayed-release carriers include supramolecular biovectors, which comprise a non-liquid hydrophilic core (e.g., a cross-linked polysaccharide or oligosaccharide) and, optionally, an external layer comprising an amphiphilic compound, such as a phospholipid (see e.g., U.S. Pat. No. 5,151,254 and PCT applications WO 94/20078, WO/94/23701 and WO 96/06638). The amount of active compound contained within a sustained release formulation depends upon the site of implantation, the rate and expected duration of release and the nature of the condition to be treated or prevented.

[2224] In another illustrative embodiment, biodegradable microspheres (e.g., polylactate polyglycolate) are employed as carriers for the compositions of this invention. Suitable biodegradable microspheres are disclosed, for example, in U.S. Pat. Nos. 4,897,268; 5,075,109; 5,928,647; 5,811,128; 5,820,883; 5,853,763; 5,814,344, 5,407,609 and 5,942,252. Modified hepatitis B core protein carrier systems such as described in WO/99 40934, and references cited therein, will also be useful for many applications. Another illustrative carrier/delivery system employs a carrier comprising particulate-protein complexes, such as those described in U.S. Pat. No. 5,928,647, which are capable of inducing a class I-restricted cytotoxic T lymphocyte responses in a host.

[2225] In another illustrative embodiment, calcium phosphate core particles are employed as carriers, vaccine adjuvants, or as controlled release matrices for the compositions of this invention. Exemplary calcium phosphate particles are disclosed, for example, in published patent application No. WO/0046147.

[2226] The pharmaceutical compositions of the invention will often further comprise one or more buffers (e.g., neutral buffered saline or phosphate buffered saline), carbohydrates (e.g., glucose, mannose, sucrose or dextrans), mannitol, proteins, polypeptides or amino acids such as glycine, antioxidants, bacteriostats, chelating agents such as EDTA or glutathione, adjuvants (e.g., aluminum hydroxide), solutes that render the formulation isotonic, hypotonic or weakly hypertonic with the blood of a recipient, suspending agents, thickening agents and/or preservatives. Alternatively, compositions of the present invention may be formulated as a lyophilizate.

[2227] The pharmaceutical compositions described herein may be presented in unit-dose or multi-dose containers, such as sealed ampoules or vials. Such containers are typically sealed in such a way to preserve the sterility and stability of the formulation until use. In general, formulations may be stored as suspensions, solutions or emulsions in oily or aqueous vehicles. Alternatively, a pharmaceutical composition may be stored in a freeze-dried condition requiring only the addition of a sterile liquid carrier immediately prior to use.

[2228] The development of suitable dosing and treatment regimens for using the particular compositions described herein in a variety of treatment regimens, including e.g., oral, parenteral, intravenous, intranasal, and intramuscular administration and formulation, is well known in the art, some of which are briefly discussed below for general purposes of illustration.

[2229] In certain applications, the pharmaceutical compositions disclosed herein may be delivered via oral administration to an animal. As such, these compositions may be formulated with an inert diluent or with an assimilable edible carrier, or they may be enclosed in hard- or soft-shell gelatin capsule, or they may be compressed into tablets, or they may be incorporated directly with the food of the diet.

[2230] The active compounds may even be incorporated with excipients and used in the form of ingestible tablets, buccal tables, troches, capsules, elixirs, suspensions, syrups, wafers, and the like (see, for example, Mathiowitz et al., Nature Mar. 27, 1997;386(6623):410-4; Hwang et al., Crit Rev Ther Drug Carrier Syst 1998;15(3):243-84; U.S. Pat. No. 5,641,515; U.S. Pat. No. 5,580,579 and U.S. Pat. No. 5,792,451). Tablets, troches, pills, capsules and the like may also contain any of a variety of additional components, for example, a binder, such as gum tragacanth, acacia, cornstarch, or gelatin; excipients, such as dicalcium phosphate; a disintegrating agent, such as corn starch, potato starch, alginic acid and the like; a lubricant, such as magnesium stearate; and a sweetening agent, such as sucrose, lactose or saccharin may be added or a flavoring agent, such as peppermint, oil of wintergreen, or cherry flavoring. When the dosage unit form is a capsule, it may contain, in addition to materials of the above type, a liquid carrier. Various other materials may be present as coatings or to otherwise modify the physical form of the dosage unit. For instance, tablets, pills, or capsules may be coated with shellac, sugar, or both. Of course, any material used in preparing any dosage unit form should be pharmaceutically pure and substantially non-toxic in the amounts employed. In addition, the active compounds may be incorporated into sustained-release preparation and formulations.

[2231] Typically, these formulations will contain at least about 0.1% of the active compound or more, although the percentage of the active ingredient(s) may, of course, be varied and may conveniently be between about 1 or 2% and about 60% or 70% or more of the weight or volume of the total formulation. Naturally, the amount of active compound(s) in each therapeutically useful composition may be prepared is such a way that a suitable dosage will be obtained in any given unit dose of the compound. Factors such as solubility, bioavailability, biological half-life, route of administration, product shelf life, as well as other pharmacological considerations will be contemplated by one skilled in the art of preparing such pharmaceutical formulations, and as such, a variety of dosages and treatment regimens may be desirable.

[2232] For oral administration the compositions of the present invention may alternatively be incorporated with one or more excipients in the form of a mouthwash, dentifrice, buccal tablet, oral spray, or sublingual orally-administered formulation. Alternatively, the active ingredient may be incorporated into an oral solution such as one containing sodium borate, glycerin and potassium bicarbonate, or dispersed in a dentifrice, or added in a therapeutically-effective amount to a composition that may include water, binders, abrasives, flavoring agents, foaming agents, and humectants. Alternatively the compositions may be fashioned into a tablet or solution form that may be placed under the tongue or otherwise dissolved in the mouth.

[2233] In certain circumstances it will be desirable to deliver the pharmaceutical compositions disclosed herein parenterally, intravenously, intramuscularly, or even intraperitoneally. Such approaches are well known to the skilled artisan, some of which are further described, for example, in U.S. Pat. No. 5,543,158; U.S. Pat. No. 5,641,515 and U.S. Pat. No. 5,399,363. In certain embodiments, solutions of the active compounds as free base or pharmacologically acceptable salts may be prepared in water suitably mixed with a surfactant, such as hydroxypropylcellulose. Dispersions may also be prepared in glycerol, liquid polyethylene glycols, and mixtures thereof and in oils. Under ordinary conditions of storage and use, these preparations generally will contain a preservative to prevent the growth of microorganisms.

[2234] Illustrative pharmaceutical forms suitable for injectable use include sterile aqueous solutions or dispersions and sterile powders for the extemporaneous preparation of sterile injectable solutions or dispersions (for example, see U.S. Pat. No. 5,466,468). In all cases the form must be sterile and must be fluid to the extent that easy syringability exists. It must be stable under the conditions of manufacture and storage and must be preserved against the contaminating action of microorganisms, such as bacteria and fungi. The carrier can be a solvent or dispersion medium containing, for example, water, ethanol, polyol (e.g., glycerol, propylene glycol, and liquid polyethylene glycol, and the like), suitable mixtures thereof, and/or vegetable oils. Proper fluidity may be maintained, for example, by the use of a coating, such as lecithin, by the maintenance of the required particle size in the case of dispersion and/or by the use of surfactants. The prevention of the action of microorganisms can be facilitated by various antibacterial and antifungal agents, for example, parabens, chlorobutanol, phenol, sorbic acid, thimerosal, and the like. In many cases, it will be preferable to include isotonic agents, for example, sugars or sodium chloride. Prolonged absorption of the injectable compositions can be brought about by the use in the compositions of agents delaying absorption, for example, aluminum monostearate and gelatin.

[2235] In one embodiment, for parenteral administration in an aqueous solution, the solution should be suitably buffered if necessary and the liquid diluent first rendered isotonic with sufficient saline or glucose. These particular aqueous solutions are especially suitable for intravenous, intramuscular, subcutaneous and intraperitoneal administration. In this connection, a sterile aqueous medium that can be employed will be known to those of skill in the art in light of the present disclosure. For example, one dosage may be dissolved in 1 ml of isotonic NaCl solution and either added to 1000 ml of hypodermoclysis fluid or injected at the proposed site of infusion, (see for example, “Remington's Pharmaceutical Sciences” 15th Edition, pages 1035-1038 and 1570-1580). Some variation in dosage will necessarily occur depending on the condition of the subject being treated. Moreover, for human administration, preparations will of course preferably meet sterility, pyrogenicity, and the general safety and purity standards as required by FDA Office of Biologics standards.

[2236] In another embodiment of the invention, the compositions disclosed herein may be formulated in a neutral or salt form. Illustrative pharmaceutically-acceptable salts include the acid addition salts (formed with the free amino groups of the protein) and which are formed with inorganic acids such as, for example, hydrochloric or phosphoric acids, or such organic acids as acetic, oxalic, tartaric, mandelic, and the like. Salts formed with the free carboxyl groups can also be derived from inorganic bases such as, for example, sodium, potassium, ammonium, calcium, or ferric hydroxides, and such organic bases as isopropylamine, trimethylamine, histidine, procaine and the like. Upon formulation, solutions will be administered in a manner compatible with the dosage formulation and in such amount as is therapeutically effective.

[2237] The carriers can further comprise any and all solvents, dispersion media, vehicles, coatings, diluents, antibacterial and antifungal agents, isotonic and absorption delaying agents, buffers, carrier solutions, suspensions, colloids, and the like. The use of such media and agents for pharmaceutical active substances is well known in the art. Except insofar as any conventional media or agent is incompatible with the active ingredient, its use in the therapeutic compositions is contemplated. Supplementary active ingredients can also be incorporated into the compositions. The phrase “pharmaceutically-acceptable” refers to molecular entities and compositions that do not produce an allergic or similar untoward reaction when administered to a human.

[2238] In certain embodiments, the pharmaceutical compositions may be delivered by intranasal sprays, inhalation, and/or other aerosol delivery vehicles. Methods for delivering genes, nucleic acids, and peptide compositions directly to the lungs via nasal aerosol sprays has been described, e.g., in U.S. Pat. No. 5,756,353 and U.S. Pat. No. 5,804,212. Likewise, the delivery of drugs using intranasal microparticle resins (Takenaga et al., J Controlled Release Mar. 2, 1998;52(1-2):81-7) and lysophosphatidyl-glycerol compounds (U.S. Pat. No. 5,725,871) are also well-known in the pharmaceutical arts. Likewise, illustrative transmucosal drug delivery in the form of a polytetrafluoroetheylene support matrix is described in U.S. Pat. No. 5,780,045.

[2239] In certain embodiments, liposomes, nanocapsules, microparticles, lipid particles, vesicles, and the like, are used for the introduction of the compositions of the present invention into suitable host cells/organisms. In particular, the compositions of the present invention may be formulated for delivery either encapsulated in a lipid particle, a liposome, a vesicle, a nanosphere, or a nanoparticle or the like. Alternatively, compositions of the present invention can be bound, either covalently or non-covalently, to the surface of such carrier vehicles.

[2240] The formation and use of liposome and liposome-like preparations as potential drug carriers is generally known to those of skill in the art (see for example, Lasic, Trends Biotechnol 1998 July;16(7):307-21; Takakura, Nippon Rinsho 1998 March;56(3):691-5; Chandran et al., Indian J Exp Biol. 1997 August;35(8):801-9; Margalit, Crit Rev Ther Drug Carrier Syst. 1995;12(2-3):233-61; U.S. Pat. No. 5,567,434; U.S. Pat. No. 5,552,157; U.S. Pat. No. 5,565,213; U.S. Pat. No. 5,738,868 and U.S. Pat. No. 5,795,587, each specifically incorporated herein by reference in its entirety).

[2241] Liposomes have been used successfully with a number of cell types that are normally difficult to transfect by other procedures, including T cell suspensions, primary hepatocyte cultures and PC 12 cells (Renneisen et al., J. Biol. Chem. Sep. 25, 1990;265(27):16337-42; Muller et al., DNA Cell Biol. 1990 April;9(3):221-9). In addition, liposomes are free of the DNA length constraints that are typical of viral-based delivery systems. Liposomes have been used effectively to introduce genes, various drugs, radiotherapeutic agents, enzymes, viruses, transcription factors, allosteric effectors and the like, into a variety of cultured cell lines and animals. Furthermore, he use of liposomes does not appear to be associated with autoimmune responses or unacceptable toxicity after systemic delivery.

[2242] In certain embodiments, liposomes are formed from phospholipids that are dispersed in an aqueous medium and spontaneously form multilamellar concentric bilayer vesicles (also termed multilamellar vesicles (MLVs).

[2243] Alternatively, in other embodiments, the invention provides for pharmaceutically-acceptable nanocapsule formulations of the compositions of the present invention. Nanocapsules can generally entrap compounds in a stable and reproducible way (see, for example, Quintanar-Guerrero et al., Drug Dev Ind Pharm. 1998 Dec;24(12):1113-28). To avoid side effects due to intracellular polymeric overloading, such ultrafine particles (sized around 0.1 μm) may be designed using polymers able to be degraded in vivo. Such particles can be made as described, for example, by Couvreur et al., Crit Rev Ther Drug Carrier Syst. 1988;5(1):1-20; zur Muhlen et al., Eur J Pharm Biopharm. 1998 March;45(2):149-55; Zambaux et al. J Controlled Release. Jan. 2, 1998;50(1-3):31-40; and U.S. Pat. No. 5,145,684.

[2244] Cancer Therapeutic Methods

[2245] Immunologic approaches to cancer therapy are based on the recognition that cancer cells can often evade the body's defenses against aberrant or foreign cells and molecules, and that these defenses might be therapeutically stimulated to regain the lost ground, e.g. pgs. 623-648 in Klein, Immunology (Wiley-Interscience, N.Y., 1982). Numerous recent observations that various immune effectors can directly or indirectly inhibit growth of tumors has led to renewed interest in this approach to cancer therapy, e.g. Jager, et al., Oncology 2001;60(1):1-7; Renner, et al., Ann Hematol 2000 Dec;79(12):651-659.

[2246] Four-basic cell types whose function has been associated with antitumor cell immunity and the elimination of tumor cells from the body are: i) B-lymphocytes which secrete immunoglobulins into the blood plasma for identifying and labeling the nonself invader cells; ii) monocytes which secrete the complement proteins that are responsible for lysing and processing the immunoglobulin-coated target invader cells; iii) natural killer lymphocytes having two mechanisms for the destruction of tumor cells, antibody-dependent cellular cytotoxicity and natural killing; and iv) T-lymphocytes possessing antigen-specific receptors and having the capacity to recognize a tumor cell carrying complementary marker molecules (Schreiber, H., 1989, in Fundamental Immunology (ed). W. E. Paul, pp. 923-955).

[2247] Cancer immunotherapy generally focuses on inducing humoral immune responses, cellular immune responses, or both. Moreover, it is well established that induction of CD4⁺ T helper cells is necessary in order to secondarily induce either antibodies or cytotoxic CD8⁺ T cells. Polypeptide antigens that are selective or ideally specific for cancer cells, particularly colon cancer cells, offer a powerful approach for inducing immune responses against colon cancer, and are an important aspect of the present invention.

[2248] Therefore, in further aspects of the present invention, the pharmaceutical compositions described herein may be used to stimulate an immune response against cancer, particularly for the immunotherapy of colon cancer. Within such methods, the pharmaceutical compositions described herein are administered to a patient, typically a warm-blooded animal, preferably a human. A patient may or may not be afflicted with cancer. Pharmaceutical compositions and vaccines may be administered either prior to or following surgical removal of primary tumors and/or treatment such as administration of radiotherapy or conventional chemotherapeutic drugs. As discussed above, administration of the pharmaceutical compositions may be by any suitable method, including administration by intravenous, intraperitoneal, intramuscular, subcutaneous, intranasal, intradermal, anal, vaginal, topical and oral routes.

[2249] Within certain embodiments, immunotherapy may be active immunotherapy, in which treatment relies on the in vivo stimulation of the endogenous host immune system to react against tumors with the administration of immune response-modifying agents (such as polypeptides and polynucleotides as provided herein).

[2250] Within other embodiments, immunotherapy may be passive immunotherapy, in which treatment involves the delivery of agents with established tumor-immune reactivity (such as effector cells or antibodies) that can directly or indirectly mediate antitumor effects and does not necessarily depend on an intact host immune system. Examples of effector cells include T cells as discussed above, T lymphocytes (such as CD8⁺ cytotoxic T lymphocytes and CD4⁺ T-helper tumor-infiltrating lymphocytes), killer cells (such as Natural Killer cells and lymphokine-activated killer cells), B cells and antigen-presenting cells (such as dendritic cells and macrophages) expressing a polypeptide provided herein. T cell receptors and antibody receptors specific for the polypeptides recited herein may be cloned, expressed and transferred into other vectors or effector cells for adoptive immunotherapy. The polypeptides provided herein may also be used to generate antibodies or anti-idiotypic antibodies (as described above and in U.S. Pat. No. 4,918,164) for passive immunotherapy.

[2251] Monoclonal antibodies may be labeled with any of a variety of labels for desired selective usages in detection, diagnostic assays or therapeutic applications (as described in U.S. Pat. Nos. 6,090,365; 6,015,542; 5,843,398; 5,595,721; and 4,708,930, hereby incorporated by reference in their entirety as if each was incorporated individually). In each case, the binding of the labelled monoclonal antibody to the determinant site of the antigen will signal detection or delivery of a particular therapeutic agent to the antigenic determinant on the non-normal cell. A further object of this invention is to provide the specific monoclonal antibody suitably labelled for achieving such desired selective usages thereof.

[2252] Effector cells may generally be obtained in sufficient quantities for adoptive immunotherapy by growth in vitro, as described herein. Culture conditions for expanding single antigen-specific effector cells to several billion in number with retention of antigen recognition in vivo are well known in the art. Such in vitro culture conditions typically use intermittent stimulation with antigen, often in the presence of cytokines (such as IL-2) and non-dividing feeder cells. As noted above, immunoreactive polypeptides as provided herein may be used to rapidly expand antigen-specific T cell cultures in order to generate a sufficient number of cells for immunotherapy. In particular, antigen-presenting cells, such as dendritic, macrophage, monocyte, fibroblast and/or B cells, may be pulsed with immunoreactive polypeptides or transfected with one or more polynucleotides using standard techniques well known in the art. For example, antigen-presenting cells can be transfected with a polynucleotide having a promoter appropriate for increasing expression in a recombinant virus or other expression system. Cultured effector cells for use in therapy must be able to grow and distribute widely, and to survive long term in vivo. Studies have shown that cultured effector cells can be induced to grow in vivo and to survive long term in substantial numbers by repeated stimulation with antigen supplemented with IL-2 (see, for example, Cheever et al., Immunological Reviews 157:177, 1997).

[2253] Alternatively, a vector expressing a polypeptide recited herein may be introduced into antigen presenting cells taken from a patient and clonally propagated ex vivo for transplant back into the same patient. Transfected cells may be reintroduced into the patient using any means known in the art, preferably in sterile form by intravenous, intracavitary, intraperitoneal or intratumor administration.

[2254] Routes and frequency of administration of the therapeutic compositions described herein, as well as dosage, will vary from individual to individual, and may be readily established using standard techniques. In general, the pharmaceutical compositions and vaccines may be administered by injection (e.g., intracutaneous, intramuscular, intravenous or subcutaneous), intranasally (e.g., by aspiration) or orally. Preferably, between 1 and 10 doses may be administered over a 52 week period. Preferably, 6 doses are administered, at intervals of 1 month, and booster vaccinations may be given periodically thereafter. Alternate protocols may be appropriate for individual patients. A suitable dose is an amount of a compound that, when administered as described above, is capable of promoting an anti-tumor immune response, and is at least 10-50% above the basal (i.e., untreated) level. Such response can be monitored by measuring the anti-tumor antibodies in a patient or by vaccine-dependent generation of cytolytic effector cells capable of killing the patient's tumor cells in vitro. Such vaccines should also be capable of causing an immune response that leads to an improved clinical outcome (e.g., more frequent remissions, complete or partial or longer disease-free survival) in vaccinated patients as compared to non-vaccinated patients. In general, for pharmaceutical compositions and vaccines comprising one or more polypeptides, the amount of each polypeptide present in a dose ranges from about 25 μg to 5 mg per kg of host. Suitable dose sizes will vary with the size of the patient, but will typically range from about 0.1 mL to about 5 mL.

[2255] In general, an appropriate dosage and treatment regimen provides the active compound(s) in an amount sufficient to provide therapeutic and/or prophylactic benefit. Such a response can be monitored by establishing an improved clinical outcome (e.g., more frequent remissions, complete or partial, or longer disease-free survival) in treated patients as compared to non-treated patients. Increases in preexisting immune responses to a tumor protein generally correlate with an improved clinical outcome. Such immune responses may generally be evaluated using standard proliferation, cytotoxicity or cytokine assays, which may be performed using samples obtained from a patient before and after treatment.

[2256] Cancer Detection and Diagnostic Compositions Methods and Kits

[2257] In general, a cancer may be detected in a patient based on the presence of one or more colon tumor proteins and/or polynucleotides encoding such proteins in a biological sample (for example, blood, sera, sputum urine and/or tumor biopsies) obtained from the patient. In other words, such proteins may be used as markers to indicate the presence or absence of a cancer such as colon cancer. In addition, such proteins may be useful for the detection of other cancers. The binding agents provided herein generally permit detection of the level of antigen that binds to the agent in the biological sample.

[2258] Polynucleotide primers and probes may be used to detect the level of mRNA encoding a tumor protein, which is also indicative of the presence or absence of a cancer. In general, a tumor sequence should be present at a level that is at least two-fold, preferably three-fold, and more preferably five-fold or higher in tumor tissue than in normal tissue of the same type from which the tumor arose. Expression levels of a particular tumor sequence in tissue types different from that in which the tumor arose are irrelevant in certain diagnostic embodiments since the presence of tumor cells can be confirmed by observation of predetermined differential expression levels, e.g., 2-fold, 5-fold, etc, in tumor tissue to expression levels in normal tissue of the same type.

[2259] Other differential expression patterns can be utilized advantageously for diagnostic purposes. For example, in one aspect of the invention, overexpression of a tumor sequence in tumor tissue and normal tissue of the same type, but not in other normal tissue types, e.g. PBMCs, can be exploited diagnostically. In this case, the presence of metastatic tumor cells, for example in a sample taken from the circulation or some other tissue site different from that in which the tumor arose, can be identified and/or confirmed by detecting expression of the tumor sequence in the sample, for example using RT-PCR analysis. In many instances, it will be desired to enrich for tumor cells in the sample of interest, e.g., PBMCs, using cell capture or other like techniques.

[2260] There are a variety of assay formats known to those of ordinary skill in the art for using a binding agent to detect polypeptide markers in a sample. See, e.g., Harlow and Lane, Antibodies: A Laboratory Manual, Cold Spring Harbor Laboratory, 1988. In general, the presence or absence of a cancer in a patient may be determined by (a) contacting a biological sample obtained from a patient with a binding agent; (b) detecting in the sample a level of polypeptide that binds to the binding agent; and (c) comparing the level of polypeptide with a predetermined cut-off value.

[2261] In a preferred embodiment, the assay involves the use of binding agent immobilized on a solid support to bind to and remove the polypeptide from the remainder of the sample. The bound polypeptide may then be detected using a detection reagent that contains a reporter group and specifically binds to the binding agent/polypeptide complex. Such detection reagents may comprise, for example, a binding agent that specifically binds to the polypeptide or an antibody or other agent that specifically binds to the binding agent, such as an anti-immunoglobulin, protein G, protein A or a lectin. Alternatively, a competitive assay may be utilized, in which a polypeptide is labeled with a reporter group and allowed to bind to the immobilized binding agent after incubation of the binding agent with the sample. The extent to which components of the sample inhibit the binding of the labeled polypeptide to the binding agent is indicative of the reactivity of the sample with the immobilized binding agent. Suitable polypeptides for use within such assays include full length colon tumor proteins and polypeptide portions thereof to which the binding agent binds, as described above.

[2262] The solid support may be any material known to those of ordinary skill in the art to which the tumor protein may be attached. For example, the solid support may be a test well in a microtiter plate or a nitrocellulose or other suitable membrane. Alternatively, the support may be a bead or disc, such as glass, fiberglass, latex or a plastic material such as polystyrene or polyvinylchloride. The support may also be a magnetic particle or a fiber optic sensor, such as those disclosed, for example, in U.S. Pat. No. 5,359,681. The binding agent may be immobilized on the solid support using a variety of techniques known to those of skill in the art, which are amply described in the patent and scientific literature. In the context of the present invention, the term “immobilization” refers to both noncovalent association, such as adsorption, and covalent attachment (which may be a direct linkage between the agent and functional groups on the support or may be a linkage by way of a cross-linking agent). Immobilization by adsorption to a well in a microtiter plate or to a membrane is preferred. In such cases, adsorption may be achieved by contacting the binding agent, in a suitable buffer, with the solid support for a suitable amount of time. The contact time varies with temperature, but is typically between about 1 hour and about 1 day. In general, contacting a well of a plastic microtiter plate (such as polystyrene or polyvinylchloride) with an amount of binding agent ranging from about 10 ng to about 10 μg, and preferably about 100 ng to about 1 μg, is sufficient to immobilize an adequate amount of binding agent.

[2263] Covalent attachment of binding agent to a solid support may generally be achieved by first reacting the support with a bifunctional reagent that will react with both the support and a functional group, such as a hydroxyl or amino group, on the binding agent. For example, the binding agent may be covalently attached to supports having an appropriate polymer coating using benzoquinone or by condensation of an aldehyde group on the support with an amine and an active hydrogen on the binding partner (see, e.g., Pierce Immunotechnology Catalog and Handbook, 1991, at A12-A13).

[2264] In certain embodiments, the assay is a two-antibody sandwich assay. This assay may be performed by first contacting an antibody that has been immobilized on a solid support, commonly the well of a microtiter plate, with the sample, such that polypeptides within the sample are allowed to bind to the immobilized antibody. Unbound sample is then removed from the immobilized polypeptide-antibody complexes and a detection reagent (preferably a second antibody capable of binding to a different site on the polypeptide) containing a reporter group is added. The amount of detection reagent that remains bound to the solid support is then determined using a method appropriate for the specific reporter group.

[2265] More specifically, once the antibody is immobilized on the support as described above, the remaining protein binding sites on the support are typically blocked. Any suitable blocking agent known to those of ordinary skill in the art, such as bovine serum albumin or Tween 20™ (Sigma Chemical Co., St. Louis, Mo.). The immobilized antibody is then incubated with the sample, and polypeptide is allowed to bind to the antibody. The sample may be diluted with a suitable diluent, such as phosphate-buffered saline (PBS) prior to incubation. In general, an appropriate contact time (i.e., incubation time) is a period of time that is sufficient to detect the presence of polypeptide within a sample obtained from an individual with colon cancer at least about 95% of that achieved at equilibrium between bound and unbound pblypeptide. Those of ordinary skill in the art will recognize that the time necessary to achieve equilibrium may be readily determined by assaying the level of binding that occurs over a period of time. At room temperature, an incubation time of about 30 minutes is generally sufficient.

[2266] Unbound sample may then be removed by washing the solid support with an appropriate buffer, such as PBS containing 0.1% Tween 20™. The second antibody, which contains a reporter group, may then be added to the solid support. Preferred reporter groups include those groups recited above.

[2267] The detection reagent is then incubated with the immobilized antibody-polypeptide complex for an amount of time sufficient to detect the bound polypeptide. An appropriate amount of time may generally be determined by assaying the level of binding that occurs over a period of time. Unbound detection reagent is then removed and bound detection reagent is detected using the reporter group. The method employed for detecting the reporter group depends upon the nature of the reporter group. For radioactive groups, scintillation counting or autoradiographic methods are generally appropriate. Spectroscopic methods may be used to detect dyes, luminescent groups and fluorescent groups. Biotin may be detected using avidin, coupled to a different reporter group (commonly a radioactive or fluorescent group or an enzyme). Enzyme reporter groups may generally be detected by the addition of substrate (generally for a specific period of time), followed by spectroscopic or other analysis of the reaction products.

[2268] To determine the presence or absence of a cancer, such as colon cancer, the signal detected from the reporter group that remains bound to the solid support is generally compared to a signal that corresponds to a predetermined cut-off value. In one preferred embodiment, the cut-off value for the detection of a cancer is the average mean signal obtained when the immobilize d antibody is incubated with samples from patients without the cancer. In general, a sample generating a signal that is three standard deviations above the predetermined cut-off value is considered positive for the cancer. In an alternate preferred embodiment, the cut-off value is determined using a Receiver Operator Curve, according to the method of Sackett et al., Clinical Epidemiology: A Basic Science for Clinical Medicine, Little Brown and Co., 1985, p. 106-7. Briefly, in this embodiment, the cut-off value may be determined from a plot of pairs of true positive rates (i.e., sensitivity) and false positive rates (100%-specificity) that correspond to each possible cut-off value for the diagnostic test result. The cut-off value on the plot that is the closest to the upper left-hand corner (i.e., the value that encloses the largest area) is the most accurate cut-off value, and a sample generating a signal that is higher than the cut-off value determined by this method may be considered positive. Alternatively, the cut-off value may be shifted to the left along the plot, to minimize the false positive rate, or to the right, to minimize the false negative rate. In general, a sample generating a signal that is higher than the cut-off value determined by this method is considered positive for a cancer.

[2269] In a related embodiment, the assay is performed in a flow-through or strip test format, wherein the binding agent is immobilized on a membrane, such as nitrocellulose. In the flow-through test, polypeptides within the sample bind to the immobilized binding agent as the sample passes through the membrane. A second, labeled binding agent then binds to the binding agent-polypeptide complex as a solution containing the second binding agent flows through the membrane. The detection of bound second binding agent may then be performed as described above. In the strip test format, one end of the membrane to which binding agent is bound is immersed in a solution containing the sample. The sample migrates along the membrane through a region containing second binding agent and to the area of immobilized binding agent. Concentration of second binding agent at the area of immobilized antibody indicates the presence of a cancer. Typically, the concentration of second binding agent at that site generates a pattern, such as a line, that can be read visually. The absence of such a pattern indicates a negative result. In general, the amount of binding agent immobilized on the membrane is selected to generate a visually discernible pattern when the biological sample contains a level of polypeptide that would be sufficient to generate a positive signal in the two-antibody sandwich assay, in the format discussed above. Preferred binding agents for use in such assays are antibodies and antigen-binding fragments thereof. Preferably, the amount of antibody immobilized on the membrane ranges from about 25 ng to about 1 μg, and more preferably from about 50 ng to about 500 ng. Such tests can typically be performed with a very small amount of biological sample.

[2270] Of course, numerous other assay protocols exist that are suitable for use with the tumor proteins or binding agents of the present invention. The above descriptions are intended to be exemplary only. For example, it will be apparent to those of ordinary skill in the art that the above protocols may be readily modified to use tumor polypeptides to detect antibodies that bind to such polypeptides in a biological sample. The detection of such tumor protein specific antibodies may correlate with the presence of a cancer.

[2271] A cancer may also, or alternatively, be detected based on the presence of T cells that specifically react with a tumor protein in a biological sample. Within certain methods, a biological sample comprising CD4⁺ and/or CD8⁺ T cells isolated from a patient is incubated with a tumor polypeptide, a polynucleotide encoding such a polypeptide and/or an APC that expresses at least an immunogenic portion of such a polypeptide, and the presence or absence of specific activation of the T cells is detected. Suitable biological samples include, but are not limited to, isolated T cells. For example, T cells may be isolated from a patient by routine techniques (such as by Ficoll/Hypaque density gradient centrifugation of peripheral blood lymphocytes). T cells may be incubated in vitro for 2-9 days (typically 4 days) at 37° C. with polypeptide (e.g., 5-25 μg/ml). It may be desirable to incubate another aliquot of a T cell sample in the absence of tumor polypeptide to serve as a control. For CD4⁺ T cells, activation is preferably detected by evaluating proliferation of the T cells. For CD8⁺ T cells, activation is preferably detected by evaluating cytolytic activity. A level of proliferation that is at least two fold greater and/or a level of cytolytic activity that is at least 20% greater than in disease-free patients indicates the presence of a cancer in the patient.

[2272] As noted above, a cancer may also, or alternatively, be detected based on the level of mRNA encoding a tumor protein in a biological sample. For example, at least two oligonucleotide primers may be employed in a polymerase chain reaction (PCR) based assay to amplify a portion of a tumor cDNA derived from a biological sample, wherein at least one of the oligonucleotide primers is specific for (i.e., hybridizes to) a polynucleotide encoding the tumor protein. The amplified cDNA is then separated and detected using techniques well known in the art, such as gel electrophoresis.

[2273] Similarly, oligonucleotide probes that specifically hybridize to a polynucleotide encoding a tumor protein may be used in a hybridization assay to detect the presence of polynucleotide encoding the tumor protein in a biological sample.

[2274] To permit hybridization under assay conditions, oligonucleotide primers and probes should comprise an oligonucleotide sequence that has at least about 60%, preferably at least about 75% and more preferably at least about 90%, identity to a portion of a polynucleotide encoding a tumor protein of the invention that is at least 10 nucleotides, and preferably at least 20 nucleotides, in length. Preferably, oligonucleotide primers and/or probes hybridize to a polynucleotide encoding a polypeptide described herein under moderately stringent conditions, as defined above. Oligonucleotide primers and/or probes which may be usefully employed in the diagnostic methods described herein preferably are at least 10-40 nucleotides in length. In a preferred embodiment, the oligonucleotide primers comprise at least 10 contiguous nucleotides, more preferably at least 15 contiguous nucleotides, of a DNA molecule having a sequence as disclosed herein. Techniques for both PCR based assays and hybridization assays are well known in the art (see, for example, Mullis et al., Cold Spring Harbor Symp. Quant. Biol., 51:263, 1987; Erlich ed., PCR Technology, Stockton Press, NY, 1989).

[2275] One preferred assay employs RT-PCR, in which PCR is applied in conjunction with reverse transcription. Typically, RNA is extracted from a biological sample, such as biopsy tissue, and is reverse transcribed to produce cDNA molecules. PCR amplification using at least one specific primer generates a cDNA molecule, which may be separated and visualized using, for example, gel electrophoresis. Amplification may be performed on biological samples taken from a test patient and from an individual who is not afflicted with a cancer. The amplification reaction may be performed on several dilutions of cDNA spanning two orders of magnitude. A two-fold or greater increase in expression in several dilutions of the test patient sample as compared to the same dilutions of the non-cancerous sample is typically considered positive.

[2276] In another aspect of the present invention, cell capture technologies may be used in conjunction, with, for example, real-time PCR to provide a more sensitive tool for detection of metastatic cells expressing colon tumor antigens. Detection of colon cancer cells in biological samples, e.g., bone marrow samples, peripheral blood, and small needle aspiration samples is desirable for diagnosis and prognosis in colon cancer patients.

[2277] Immunomagnetic beads coated with specific monoclonal antibodies to surface cell markers, or tetrameric antibody complexes, may be used to first enrich or positively select cancer cells in a sample. Various commercially available kits may be used, including Dynabeads® Epithelial Enrich (Dynal Biotech, Oslo, Norway), StemSep™ (StemCell Technologies, Inc., Vancouver, B C), and RosetteSep (StemCell Technologies). A skilled artisan will recognize that other methodologies and kits may also be used to enrich or positively select desired cell populations. Dynabeads® Epithelial Enrich contains magnetic beads coated with mAbs specific for two glycoprotein membrane antigens expressed on normal and neoplastic epithelial tissues. The coated beads may be added to a sample and the sample then applied to a magnet, thereby capturing the cells bound to the beads. The unwanted cells are washed away and the magnetically isolated cells eluted from the beads and used in further analyses.

[2278] RosetteSep can be used to enrich cells directly from a blood sample and consists of a cocktail of tetrameric antibodies that targets a variety of unwanted cells and crosslinks them to glycophorin A on red blood cells (RBC) present in the sample, forming rosettes. When centrifuged over Ficoll, targeted cells pellet along with the free RBC. The combination of antibodies in the depletion cocktail determines which cells will be removed and consequently Which cells will be recovered. Antibodies that are available include, but are not limited to: CD2, CD3, CD4, CD5, CD8, CD10, CD11b, CD14, CD15, CD16, CD19, CD20, CD24, CD25, CD29, CD33, CD34, CD36, CD38, CD41, CD45, CD45RA, CD45RO, CD56, CD66B, CD66e, HLA-DR, IgE, and TCRαβ.

[2279] Additionally, it is contemplated in the present invention that mAbs specific for colon tumor antigens can be generated and used in a similar manner. For example, mAbs that bind to tumor-specific cell surface antigens may be conjugated to magnetic beads, or formulated in a tetrameric antibody complex, and used to enrich or positively select metastatic colon tumor cells from a sample. Once a sample is enriched or positively selected, cells may be lysed and RNA isolated. RNA may then be subjected to RT-PCR analysis using colon tumor-specific primers in a real-time PCR assay as described herein. One skilled in the art will recognize that enriched or selected populations of cells may be analyzed by other methods (e.g. in situ hybridization or flow cytometry).

[2280] In another embodiment, the compositions described herein may be used as markers for the progression of cancer. In this embodiment, assays as described above for the diagnosis of a cancer may be performed over time, and the change in the level of reactive polypeptide(s) or polynucleotide(s) evaluated. For example, the assays may be performed every 24-72 hours for a period of 6 months to 1 year, and thereafter performed as needed. In general, a cancer is progressing in those patients in whom the level of polypeptide or polynucleotide detected increases over time. In contrast, the cancer is not progressing when the level of reactive polypeptide or polynucleotide either remains constant or decreases with time.

[2281] Certain in vivo diagnostic assays may be performed directly on a tumor. One such assay involves contacting tumor cells with a binding agent. The bound binding agent may then be detected directly or indirectly via a reporter group. Such binding agents may also be used in histological applications. Alternatively, polynucleotide probes may be used within such applications.

[2282] As noted above, to improve sensitivity, multiple tumor protein markers may be assayed within a given sample. It will be apparent that binding agents specific for different proteins provided herein may be combined within a single assay. Further, multiple primers or probes may be used concurrently. The selection of tumor protein markers may be based on routine experiments to determine combinations that results in optimal sensitivity. In addition, or alternatively, assays for tumor proteins provided herein may be combined with assays for other known tumor antigens.

[2283] The present invention further provides kits for use within any of the above diagnostic methods. Such kits typically comprise two or more components necessary for performing a diagnostic assay. Components may be compounds, reagents, containers and/or equipment. For example, one container within a kit may contain a monoclonal antibody or fragment thereof that specifically binds to a tumor protein. Such antibodies or fragments may be provided attached to a support material, as described above. One or more additional containers may enclose elements, such as reagents or buffers, to be used in the assay. Such kits may also, or alternatively, contain a detection reagent as described above that contains a reporter group suitable for direct or indirect detection of antibody binding.

[2284] Alternatively, a kit may be designed to detect the level of mRNA encoding a tumor protein in a biological sample. Such kits generally comprise at least one oligonucleotide probe or primer, as described above, that hybridizes to a polynucleotide encoding a tumor protein. Such an oligonucleotide may be used, for example, within a PCR or hybridization assay. Additional components that may be present within such kits include a second oligonucleotide and/or a diagnostic reagent or container to facilitate the detection of a polynucleotide encoding a tumor protein.

[2285] The following Examples are offered by way of illustration and not by way of limitation.

### EXAMPLES

### Example 1

### Preparation of Colon Tumor Subtraction Libraries and Identification of Colon Tumor Protein cDNAs

[2286] This Example illustrates the identification of cDNA molecules encoding colon tumor proteins. PolyA mRNA was prepared from a pool of three colon tumor cell lines (adenocarcinomas) grown in SCID mice were subtracted with a set of transcripts from normal lung, adrenal gland, bone marrow, small intestine, stomach, pancreas, normal colon, HMEC (human mammary epithelial cell line) and SCID mouse liver/spleen samples. The cDNA synthesis, hybridizations, and PCR amplifications were performed according to standard procedures (Clontech), with modifications at the cDNA digestion steps and in the tester to driver hybridization ratios. Following the PCR amplification steps, the cDNAs were cloned into the pCR2.1 plasmid vector. To analyze the efficiency of the subtraction, the housekeeping gene, actin, was PCR amplified from dilutions of subtracted as well as unsubtracted PCR samples. This result suggests that the library was enriched for genes overexpressed in colon tumor samples.

[2287] The Clontech PCR-based cDNA subtraction approach was utilized to prepare two cDNA libraries from pools of tester mRNA collected from three Dukes B stage colon tumor samples. Eight normal tissues, including lung, adrenal gland, bone marrow, small intestine, heart, pancreas, colon, and liver were represented in the driver mRNA pool. The two libraries, CS/B1105 and CS/B1605, shared the same tester and driver mRNA samples but differed in their tester:driver ratios (1:5 and 1:30, respectively). To analyze the efficiency of the subtraction, the housekeeping gene, actin, was PCR amplified from dilutions of subtracted as well as unsubtracted PCR samples. This results suggest that the library was enriched for genes overexpressed in colon tumor samples. 172 randomly selected clones were subjected to DNA sequencing and are presented herein as SEQ ID NO: 57-229. Additional sequence data was generated by bulk sequencing clones isolated from the CS/B1105 and CS/B1605 subtraction libraries and are presented herein as SEQ ID NO: 230-1660.

[2288] Further disclosed herein are sequences derived from a fourth colon tumor expression library which sequences are presented herein as SEQ ID NO:1661-1704.

[2289] Antigens obtained from this colon PCR subtracted cDNA libraries may be used for immunotherapeutic purposes in individuals with colon adenocarcinoma and/or as diagnostic markers for colon adenocarcinoma.

### Example 2

### Analysis of cDNA Expression Using Microarray Technology

[2290] In additional studies, sequences disclosed herein were evaluated for overexpression in specific tumor tissues by microarray analysis. Using this approach, cDNA sequences were PCR amplified and their mRNA expression profiles in tumor and normal tissues were examined using cDNA microarray technology essentially as described (Schena et al., Science 270(5235):467-70 (1995). In brief, the clones were arrayed onto glass slides as multiple replicas, with each location corresponding to a unique cDNA clone (as many as 5500 clones can be arrayed on a single slide, or chip). Each chip was hybridized with a pair of cDNA probes that were fluorescence-labeled with Cy3 and Cy5, respectively. Typically, 1 μg of polyA⁺ RNA was used to generate each cDNA probe. After hybridization, the chips were scanned and the fluorescence intensity recorded for both Cy3 and Cy5 channels. There were multiple built-in quality control steps. First, the probe quality was monitored using a panel of ubiquitously expressed genes. Secondly, the control plate also includee yeast DNA fragments of which complementary RNA were spiked into the probe synthesis for measuring the quality of the probe and the sensitivity of the analysis. Currently, this methodology offers a sensitivity of 1 in 100,000 copies of mRNA. Finally, the reproducibility of this technology was ensured by including duplicated control cDNA elements at different locations.

[2291] Table 2 identifies 27 clones found to be at least two-fold overexpressed in colon tumor cells as compared to a panel of normal tissues by microarray analysis.

TABLE 2

| array | Clone Sequence Identifier | Ratio | clone I.D. |
|---|---|---|---|
| p0175r03c18 | R0676 F9 | 2.62 | 72239, |
| p0174r13c21 | R0675 A11 | 2.16 | 72237, |
| p0174r09c13 | R0674 A7 | 2.67 | 72236, |
| p0176r01c22 | R0680 B11 | 2.3 | 72244, |
| p0174r05c17 | R0673 A9 | 2.09 | 72234, |
| p0174r08c24 | R0673 H12 | 2.06 | 71574, 72235 |
| p0174r16c17 | R0675 G9 | 2.46 | 72238, |
| p0175r07c22 | R0677 F11 | 3.21 | 72241, |
| p0176r03c02 | R0680 F1 | 2.93 | 72245, |
| p0176r04c06 | R0680 H3 | 2.09 | 72246, |
| p0177r07c22 | R0685 F11 | 2.27 | 71675, 72247, 72902, |
| | | | 71041 |
| p0177r13c06 | R0687 B3 | 3.43 | 72249, 72904, 70985 |
| p0175r10c04 | R0678 D2 | 2.05 | 70424, 72899 |
| p0176r16c05 | R0683 G3 | 2.03 | 70426, 72900 |
| p0174r07c23 | R0673 E12 | 2.58 | 72901, |
| p0174r03c05 | R0672 E3 | 2.09 | 72233 |
| p0175r06c13 | R0677 C7 | 2.13 | 72240 |
| p0175r11c19 | R0678 E10 | 3.44 | 72242 |
| p0175r14c21 | R0679 C11 | 2.75 | 72243 |
| p0174r10c20 | R0674 D10 | 2.58 | 71575 |
| p0172r01c06 | R0664 B3 | 2.05 | 71569 |
| p0173r09c05 | R0670 A3 | 2.35 | 71571 |
| p0172r05c18 | R0665 B9 | 2.36 | 70580 |
| p0175r04c07 | 676_G4 & 678_H12 & | 3.94 | 70581, 70582, 70586, |
| | 681_B5 & 682_E4 | | 70589 |
| p0176r07c14 | R0681 F7 | 2.27 | 70587 |
| p0176r08c22 | R0681 H11 | 2.02 | 70584 |
| p0176r08c06 | R0681 H3 | 2.25 | 70588 |

[2292] In addition, the following clones (Table 3) were repeatedly identified by microarray analysis as being at least two-fold overexpressed in colon tumor cells as compared to a panel of normal tissues.

TABLE 3

| | | | |
|---|---|---|---|
| 70971 | 70973 | 70974 | 71049 |
| 70975 | 70977 | 70980 | 71058 |
| 70981 | 70982 | 70986 | 71063 |
| 70987 | 70988 | 70997 | 71051 |
| 70998 | 70999 | 71006 | 71059 |
| 71008 | 71009 | 71011 | 71065 |
| 71012 | 71018 | 71021 | 71055 |
| 71022 | 71024 | 71028 | 71062 |
| 71029 | 71032 | 71036 | 71066 |
| 71037 | 71039 | 71045 | |

### Example3

### Analysis of cDNA Expression Using Real-Time PCR

[2293] Two clones isolated from the subtraction library described in Example 1 and that showed at least 2-fold overexpression in colon tumors by microarray, were selected for further mRNA expression analysis by real-time PCR. The first clone, C1490P (SEQ ID NO:1660; also referred to as clone R0680 B11 and 72244), showed no significant similarity to any known sequences when searched against the Genbank nucleic acid database. The second clone, C1491 P (SEQ ID NO:1681; also referred to as clone R0683 G3 and 70426), has some similarity to adenovirus EIA enhancer binding protein (set forth in SEQ ID NO:1788 (cDNA) and 1789 (amino acid)).

[2294] The first-strand cDNA used in the quantitative real-time PCR was synthesized from 20 μg of total RNA that was treated with DNase I (Amplification Grade, Gibco BRL Life Technology, Gaithersburg, Md.), using Superscript Reverse Transcriptase (RT) (Gibco BRL Life Technology, Gaithersburg, Md.). Real-time PCR was performed with a GeneAmP™ 5700 sequence detection system (PE Biosystems, Foster City, Calif.). The 5700 system uses SYBR™ green, a fluorescent dye that only intercalates into double stranded DNA, and a set of gene-specific forward and reverse primers. The increase in fluorescence was monitored during the whole amplification process. The optimal concentration of primers was determined using a checkerboard approach and a pool of cDNAs from breast tumors was used in this process. The PCR reaction was performed in 25 μl volumes that include 2.5 μl of SYBR green buffer, 2 μl of cDNA template and 2.5 μl each of the forward and reverse primers for the gene of interest. The cDNAs used for RT reactions were diluted 1:10 for each gene of interest and 1:100 for the β-actin control. In order to quantitate the amount of specific cDNA (and hence initial mRNA) in the sample, a standard curve was generated for each run using the plasmid DNA containing the gene of interest. Standard curves were generated using the Ct values determined in the real-time PCR which were related to the initial cDNA concentration used in the assay. Standard dilution ranging from 20-2×10⁶ copies of the gene of interest was used for this purpose. In addition, a standard curve was generated for β-actin ranging from 200 fg-2000 fg. This enabled standardization of the initial RNA content of a tissue sample to the amount of β-actin for comparison purposes. The mean copy number for each group of tissues tested was normalized to a constant amount of β-actin, allowing the evaluation of the over-expression levels seen with each of the genes.

[2295] The real-time analysis confirmed previous microarray results and showed that C1490P is overexpressed in the majority of colon tumor samples in comparison to normal samples. Overexpression of C1490P was also seen in lymph nodes and thymus. Some C1490P expression was observed in normal colon but at a much lower level than was seen in tumor samples. Likewise, some low levels of expression were observed in breast, esophagus, small intestine, stomach, trachea, thymus, and bone marrow. C1491P is overexpressed in the majority of colon tumor samples when compared to normal colon and a panel of other normal tissue. Low expression of this gene was observed in normal pancreas, pituitary, and low expression in some salivary and adrenal gland samples. Thus, the results indicate that these 2 candidates may be used for immunotherapeutic purposes in individuals with colon cancer and/or as diagnostic markers for colon cancer.

### Example 4

### Isolation of cDNAs Encoding Colon Tumor Antigens from Two PCR-Based Subtracted Matched Pair cDNA Libraries

[2296] A PCR-based cDNA subtraction approach was undertaken to identify colon tumor-specific cDNAs, utilizing donor matched pairs of colon tumor and normal colon tissue as tester and driver respectively.

[2297] Using the methodology outlined by Clontech (Palo Alto, Calif.), two separate libraries (CMPP-86.10 & CMPP-86.12) were constructed. Each library was made from a separate donor, using a matched pair of colon tumor sample as tester and same donor matched normal colon tissue as part of the driver pool. In addition to the same donor matched pair colon driver mRNA, the driver pool also contained mRNA from normal Liver, Salivary gland, Small intestine, Stomach, Bone Marrow, Lung, Heart, Brain and Pancreas. First strand cDNA was synthesized using the primer supplied in a Clontech PCR-Select cDNA Subtraction Kit (Clontech, Palo Alto, Calif.). The driver DNA consisted of cDNAs from normal colon tissue with the tester cDNA being from donor matched colon tumors as described above. Double-stranded cDNA was synthesized for both tester and driver, and digested with a combination of endonucleases (Dral, Mscl, Stul, Pvull) which recognize six-nucleotide restriction sites. This modification of the digestion procedure resulted in an average cDNA size of 600 base pairs, rather than the average size of 300 base pairs that results from digestion with Rsal according to the Clontech protocol. This modification did not affect the subtraction efficiency. The digested tester cDNAs were ligated to two different adaptors and the subtraction was performed according to Clontech's protocol.

[2298] The tester and driver libraries were then hybridized using excess driver cDNA. In the first hybridization step, driver was separately hybridized with each of the two tester cDNA populations. This resulted in populations of (a) unhybridized tester cDNAs, (b) tester cDNAs hybridized to other tester cDNAs, (c) tester cDNAs hybridized to driver cDNAs and (d) unhybridized driver cDNAs. The two separate hybridization reactions were then combined, and rehybridized in the presence of additional denatured driver cDNA. Following this second hybridization, in addition to populations (a) through (d), a fifth population (e) was generated in which tester cDNA with one adapter hybridized to tester cDNA with the second adapter. Accordingly, the second hybridization step resulted in enrichment of differentially expressed sequences which could be used as templates for PCR amplification with adaptor-specific primers.

[2299] The ends were then filled in, and PCR amplification was performed using adaptor-specific primers. Only population (e), which contained tester cDNA that did not hybridize to driver cDNA, was amplified exponentially. A second PCR amplification step was then performed, to reduce background and further enrich differentially expressed sequences. This PCR-based subtraction technique normalizes differentially expressed cDNAs so that rare transcripts that are overexpressed in colon tumor tissue may be recoverable. Such transcripts would be difficult to recover by traditional subtraction methods.

[2300] To analyze the efficiency of the subtraction, the housekeeping gene actin was PCR amplified from dilutions of subtracted as well as unsubtracted PCR samples. This analysis suggested that the libraries were enriched for genes overexpressed in colon tumor samples. Thus, the cDNA clones isolated by this approach represent antigens suitable for colon cancer diagnostics and/or immunotherapeutic applications.

[2301] The resulting PCR products were subcloned into the TA cloning vector, PCRII (Invitrogen, San Diego, Calif.) and transformed into ElectroMax E. coli DH10B cells (Gibco BRL Life, Technologies) by electroporation. DNA was isolated from 107 independent clones and sequenced using a Perkin Elmer/Applied Biosystems Division (Foster City, Calif.) Automated Sequencer Model 373A. The sequences isolated as described herein are set forth in SEQ ID NOs:1790-1981. The sequences were then used as a query to search against GenBank. Those sequences that showed some degree of similarity to sequences in GenBank are described in Table 4. Those sequences that showed no significant similarity to sequences in GenBank are listed in Table 5.

TABLE 4
cDNA SEQUENCES FROM A SUBTRACTED MATCHED PAIR
cDNA LIBRARY THAT SHOWED SOME DEGREE OF SIMILARITY
TO SEQUENCES IN GENBANK

| SEQ ID NO: | Clone ID | Genbank |
|---|---|---|
| SEQ ID NO: 1790 | 74798 | Homo sapiens RAN binding protein 2 (RANBP2), |
| | | mRNA |
| SEQ ID NO: 1791 | 74799 | Human interleukin 1 receptor antagonist (IL1RN) |
| | | gene, complete cds |
| SEQ ID NO: 1792 | 74803 | Homo sapiens adenylyl cyclase-associated protein |
| | | (CAP), mRNA |
| SEQ ID NO: 1793 | 74804 | Homo sapiens hypothetical protein MGC3077 |
| | | (MGC3077), mRNA |
| SEQ ID NO: 1794 | 74806 | Homo sapiens NRAS-related gene (D1S155E), |
| | | mRNA |
| SEQ ID NO: 1795 | 74807 | Homo sapiens cDNA FLJ11051 fis, clone |
| | | PLACE1004629, weakly similar to PROTEIN OS-9 |
| | | PRECURSOR |
| SEQ ID NO: 1796 | 74809 | Human DNA sequence from clone 391022 on |
| | | chromosome 6p21.2-21.31. Contains |
| | | pseudogenes similar to ribosomal proteins L44 and |
| | | L30 |
| SEQ ID NO: 1797 | 74811 | Mus musculus 18 days embryo cDNA, RIKEN full- |
| | | length enriched library, clone:1110020N13, full |
| | | insert sequence |
| SEQ ID NO: 1798 | 74812 | Homo sapiens cDNA FLJ13124 fis, clone |
| | | NT2RP3002861 |
| SEQ ID NO: 1799 | 74813 | Homo sapiens cDNA:FLJ22083 fis, clone |
| | | HEP14459, highly similar to HUM3H3M Homo |
| | | sapiens 3-hydroxy-3-methylglutaryl coenzymeA |
| | | synthase |
| SEQ ID NO: 1801 | 74815 | Homo sapiens , heat shock 40 kD protein 1, clone |
| | | MGC:8425, mRNA, complete cds |
| SEQ ID NO: 1802 | 74816 | Homo sapiens hypothetical protein FLJ22195 |
| | | (FLJ22195), mRNA |
| SEQ ID NO: 1803 | 74821 | Homo sapiens similar to protein phosphatase 2, |
| | | regulatory subunit B(B56), epsilon isoform |
| | | (H. sapiens) (LOC63385), mRNA |
| SEQ ID NO: 1804 | 74823 | Human mRNA for KIAA0071 gene, partial cds |
| SEQ ID NO: 1805 | 74824 | Homo sapiens tumor protein, translationally- |
| | | controlled 1 (TPT1), mRNA |
| SEQ ID NO: 1806 | 74827 | Homo sapiens , ribophorin II, clone MGC:1817, |
| | | mRNA, complete cds |
| SEQ ID NO: 1807 | 74828 | Homo sapiens similar to HSPC039 protein |
| | | (H.sapiens) (LOC65818), mRNA |
| SEQ ID NO: 1808 | 74829 | Homo sapiens cell cycle protein CDC20 mRNA, |
| | | complete cds |
| SEQ ID NO: 1809 | 74833 | Homo sapiens progesterone membrane binding |
| | | protein (PMBP), mRNA |
| SEQ ID NO: 1810 | 74835 | Homo sapiens phosphatidic acid phosphatase type |
| | | 2C (PPAP2C), mRNA |
| SEQ ID NO: 1811 | 74841 | Homo sapiens SET translocation (myeloid |
| | | leukemia-associated) (SET), mRNA |
| SEQ ID NO: 1812 | 74844 | Homo sapiens speckle-type POZ protein (SPOP), |
| | | mRNA |
| SEQ ID NO: 1813 | 74846 | Homo sapiens cDNA:FLJ22784 fis, clone |
| | | KAIA2048 |
| SEQ ID NO: 1814 | 74848 | Homo sapiens exostoses (multiple) 2 (EXT2), |
| | | mRNA |
| SEQ ID NO: 1815 | 74849 | H.sapiens mRNA for MEMD protein |
| SEQ ID NO: 1816 | 74850 | Homo sapiens clone CTD-2562F8, complete |
| | | sequence |
| SEQ ID NO: 1817 | 74851 | Homo sapiens chromosome 5 clone CTC-278H1, |
| | | complete sequence |
| SEQ ID NO: 1818 | 74852 | Homo sapiens Alg5, S. cerevisiae, homolog of |
| | | (ALG5), mRNA |
| SEQ ID NO: 1819 | 74854 | Human cis-acting sequence |
| SEQ ID NO: 1820 | 74856 | Homo sapiens HSPC128 protein (HSPC128), |
| | | mRNA |
| SEQ ID NO: 1821 | 74857 | Homo sapiens cDNA FLJ11051 fis, clone |
| | | PLACE1004629, weakly similar to PROTEIN OS-9 |
| | | PRECURSOR |
| SEQ ID NO: 1822 | 74858 | Homo sapiens CHK1 (checkpoint, S.pombe) |
| | | homolog (CHEK1), mRNA |
| SEQ ID NO: 1824 | 74861 | Homo sapiens signal sequence receptor, gamma |
| | | (translocon-associated protein gamma) (SSR3), |
| | | mRNA |
| SEQ ID NO: 1825 | 74862 | Homo sapiens cDNA:FLJ21325 fis, clone |
| | | COLO2408, highly similar to AF147723 Homo |
| | | sapiens lipopolysaccharide specific response-68 |
| | | protein (LSR68), mRNA |
| SEQ ID NO: 1826 | 74863 | Homo sapiens hypothetical protein FLJ10971 |
| | | (FLJ10971), mRNA |
| SEQ ID NO: 1827 | 74864 | Human mRNA for ubiquitin activating enzyme E1 |
| SEQ ID NO: 1828 | 74865 | Homo sapiens mRNA for F1 beta subunit, |
| | | complete cds |
| SEQ ID NO: 1829 | 74868 | Homo sapiens similar to histidine triad nucleotide- |
| | | binding protein (H.sapiens) (LOC65458), mRNA |
| SEQ ID NO: 1831 | 74870 | Homo sapiens 60S ribosomal protein L15 (EC45 |
| | | mRNA, complete cds |
| SEQ ID NO: 1832 | 74871 | Homo sapiens thioredoxin peroxidase (antioxidant |
| | | enzyme) AOE372), mRNA |
| SEQ ID NO: 1833 | 74873 | Human skeletal muscle alpha-tropomyosin |
| | | (hTM-alpha) mRNA, 3′ end |
| SEQ ID NO: 1834 | 74878 | H. sapiens (HepG2) LAL mRNA for lysosomal acid |
| | | lipase |
| SEQ ID NO: 1835 | 74879 | Homo sapiens, testis enhanced gene transcript, |
| | | clone MGC:5230, mRNA, complete cds |
| SEQ ID NO: 1836 | 74883 | Homo sapiens H2A histone family, member Z |
| | | (H2AFZ), mRNA |
| SEQ ID NO: 1838 | 74885 | Homo sapiens chromosome 16 clone RP11- |
| | | 452G23, complete sequence Repeat? |
| SEQ ID NO: 1839 | 74887 | Homo sapiens RAD17 pseudogene, complete |
| | | sequence (491_556) 1_556 |
| SEQ ID NO: 1840 | 74889 | Human hexokinase II pseudogene, complete cds |
| SEQ ID NO: 1841 | 74890 | Homo sapiens cDNA:FLJ21210 fis, clone |
| | | COL00479 |
| SEQ ID NO: 1842 | 74892 | H.sapiens (xs163) mRNA, 390bp |
| SEQ ID NO: 1843 | 74893 | Homo sapiens ring finger protein (C3H2C3 type) 6 |
| | | (RNF6), mRNA |
| SEQ ID NO: 1844 | 74704 | Human mRNA for integrin beta 1 subunit |
| SEQ ID NO: 1845 | 74705 | Homo sapiens CGI-29 protein (LOC51074), mRNA |
| SEQ ID NO: 1846 | 74708 | Homo sapiens mRNA; cDNA DKFZp434I1621 |
| | | (from clone DKFZp434I1621); complete cds |
| SEQ ID NO: 1847 | 74710 | Homo sapiens cDNA FLJ12249 fis, clone |
| | | MAMMA1001411, highly similar to Homo sapiens |
| | | mRNA; cDNA DKFZp564O0823 (from clone |
| | | DKFZp564O0823) |
| SEQ ID NO: 1848 | 74718 | Homo sapiens DEK oncogene (DNA binding) |
| | | (DEK), mRNA |
| SEQ ID NO: 1849 | 74724 | Homo sapiens progesterone binding protein |
| | | (HPR6.6), mRNA |
| SEQ ID NO: 1850 | 74727 | Homo sapiens COX17 (yeast) homolog, |
| | | cytochrome c oxidase assembly protein (COX17), |
| | | mRNA |
| SEQ ID NO: 1851 | 74728 | Homo sapiens chloride channel, calcium activated, |
| | | family member 1(CLCA1), mRNA |
| SEQ ID NO: 1854 | 74732 | Homo sapiens hypothetical protein similar to |
| | | ankyrinrepeat-containing protein AKR1 |
| | | (FLJ10852), mRNA |
| SEQ ID NO: 1855 | 74733 | Homo sapiens peroxisome proliferative activated |
| | | receptor, gamma (PPARG), mRNA |
| SEQ ID NO: 1856 | 74735 | Human DNA sequence from clone RP4-735G18 on |
| | | chromosome 22 Contains a GSS and a CpG |
| | | Island, complete sequence [Homo sapiens ] |
| | | Repeat? |
| SEQ ID NO: 1857 | 74736 | Human Chromosome 16 BAC clone CIT987SK-A- |
| | | 363E6, complete sequence [Homo sapiens ] |
| SEQ ID NO: 1859 | 74739 | Homo sapiens cDNA FLJ20676, fis, clone |
| | | KAIA4294, highly similar to AF097021 Homo |
| | | sapiens GW112 protein |
| SEQ ID NO: 1860 | 74742 | Homo sapiens chromosome 5 clonet CTC-286N18, |
| | | complete sequence |
| SEQ ID NO: 1861 | 74744 | Homo sapiens ribosomal protein S15a (RPS15A), |
| | | mRNA |
| SEQ ID NO: 1862 | 74746 | Homo sapiens TERA protein (TERA), mRNA |
| SEQ ID NO: 1863 | 74748 | Homo sapiens cytochrome P450, 51 (lanosterol |
| | | 14-alpha-demethylase) (CYP51), mRNA Repeat? |
| SEQ ID NO: 1864 | 74749 | Homo sapiens mRNA, cDNA DKFZp564H2171 |
| | | (from clone DKFZp564H2171); partial cds |
| SEQ ID NO: 1865 | 74750 | Homo sapiens tranlocation protein 1 (TLOC1), |
| | | mRNA |
| SEQ ID NO: 1866 | 74751 | Human adenylosuccinate synthetase mRNA |
| SEQ ID NO: 1867 | 74755 | Homo sapiens SLC11A3 iron transporter mRNA, |
| | | complete cds |
| SEQ ID NO: 1868 | 74756 | Homo sapiens chloride channel, calcium activated, |
| | | family member 1(CLCA1), mRNA |
| SEQ ID NO: 1869 | 74757 | Homo sapiens cDNA FLJ20816 fis, clone |
| | | ADSE00693 |
| SEQ ID NO: 1870 | 74760 | Homo sapiens putative DNA-directed RNA |
| | | polymerase III C11 subunitgene, complete cds |
| SEQ ID NO: 1871 | 74761 | Homo sapiens x 003 protein (MDS003), mRNA |
| SEQ ID NO: 1872 | 74763 | Homo sapiens laminin, gamma 2 (nicein (100 kD), |
| | | kalinin (105 kD), BM600(100 kD), Herlitz junctional |
| | | epidemolysis bullosa)) (LAMC2), mRNA |
| SEQ ID NO: 1874 | 74767 | Homo sapiens HYA22 protein (HYA22), mRNA |
| SEQ ID NO: 1875 | 74768 | Homo sapiens CATX-11 mRNA, partial cds |
| SEQ ID NO: 1876 | 74769 | Homo sapiens , proteasome (prosome, macropain) |
| | | subunit, alpha type, 1, clone MGC:1667, mRNA, |
| | | complete cds |
| SEQ ID NO: 1877 | 74770 | Homo sapiens nucleolar protein p40; homolog of |
| | | yeast EBNA1-binding protein (P40), mRNA |
| SEQ ID NO: 1878 | 74772 | Homo sapiens vacuolar ATPase isoform VA68 |
| | | mRNA, complete cds |
| SEQ ID NO: 1879 | 74774 | Homo sapiens mRNA for DVS27-related protein, |
| | | complete cds |
| SEQ ID NO: 1880 | 74776 | Homo sapiens BAC clone RP11-549B18 from 18, |
| | | complete sequence |
| SEQ ID NO: 1881 | 74777 | Homo sapiens transcription elongation factor |
| | | B(SIII), polypeptide1-like (TCEB1L), mRNA |
| SEQ ID NO: 1882 | 74778 | Homo sapiens mRNA for KIAA1228 protein, partial |
| | | cds |
| SEQ ID NO: 1883 | 74779 | Homo sapiens calcium-activated chloride channel |
| | | protein 1 (CaCC1) mRNA, complete cds |
| SEQ ID NO: 1884 | 74783 | Homo sapiens hypothetical protein |
| | | (DKFZp586G0123), mRNA |
| SEQ ID NO: 1885 | 74784 | Homo sapiens cDNA FLJ14265 fis, clone |
| | | PLACE1002256 |
| SEQ ID NO: 1886 | 74785 | Homo sapiens polymyositis/scleroderma |
| | | autoantigen 1 (75 kD) (PMSCL1), mRNA |
| SEQ ID NO: 1887 | 74786 | Homo sapiens cysteine-rich motor neuron 1 |
| | | (CRIM1), mRNA |
| SEQ ID NO: 1888 | 74787 | Homo sapiens selenoprotein T (LOC51714), |
| | | mRNA |
| SEQ ID NO: 1889 | 74788 | Homo sapiens small acidic protein |
| | | (IMAGE145052), mRNA |
| SEQ ID NO: 1890 | 74789 | Human DNA sequence from PAC 313L4 on |
| | | chromosome 1q24. Contains ESTs |
| SEQ ID NO: 1891 | 74790 | Homo sapiens beta-site APP_cleaving enzyme 2 |
| | | (BACE2), mRNA |
| SEQ ID NO: 1892 | 74791 | Homo sapiens 12p BAC RP11-996F15 (Roswell |
| | | Park Cancer Institute Human BACLibrary) |
| | | complete sequence |
| SEQ ID NO: 1893 | 74794 | Homo sapiens RNA binding motif protein 3 |
| | | (RBM3), mRNA |
| SEQ ID NO: 1894 | 74795 | Homo sapiens chromosome 17, clone |
| | | hRPC.1073_F_15, complete sequence |
| SEQ ID NO: 1895 | 74796 | Homo sapiens HIRIP5 protein (HIRIP5), mRNA |
| SEQ ID NO: 1896 | 74797 | Homo sapiens cDNA:FLJ21323 fix, clone |
| | | COL02374 |

[2302] TABLE 5
cDNA SEQUENCES FROM A SUBTRACTED MATCHED
PAIR cDNA LIBRARY THAT SHOWED NO SIGNIFICANT
SIMILARITY TO SEQUENCES IN GENBANK

| SEQ ID NO: | Clone ID |
|---|---|
| SEQ ID NO: 1800 | 74814 |
| SEQ ID NO: 1823 | 74859 |
| SEQ ID NO: 1830 | 74869 |
| SEQ ID NO: 1837 | 74884 |
| SEQ ID NO: 1852 | 74729 |
| SEQ ID NO: 1858 | 74737 |
| SEQ ID NO: 1853 | 74730 |
| SEQ ID NO: 1873 | 74766 |

### Example 5

### Isolation of cDNAs Encoding Colon Tumor Antigens from a PCR-Based Subtracted LCM cDNA Library

[2303] A PCR-based subtracted cDNA library was constructed as described in Example 1 using colon tumor tissue derived from LCM (laser capture microdissection colon tumor tissue samples). Seventeen hundred clones from this subtracted cDNA library were PCR amplified and arrayed on Corixa DNA chips for microarray analysis. They were hybridized with probes which were generated from colon tumors and a varity of normal tissues including normal colon and were fluorescently labeled. Twenty-four clones with two-fold overexpression in colon tumors as compared to normal colon tissue and a panel of other normal tissues were selected, and their sequences were determined by DNA sequencing. These sequences are set forth in SEQ ID NOs:1897-1927. Their identities were determined by searching public database including Genbank. Table 6 summarizes the microarray and Genbank search results for those sequences that showed some degree of similiarity with known sequences in the database. One sequence, SEQ ID NO:1922, shown in Table 7, showed no significant similiarity to sequences in the database.

TABLE 6
cDNA SEQUENCES FROM A SUBTRACTED LCM cDNA LIBRARY
THAT SHOWED SOME DEGREE OF SIMILARITY TO SEQUENCES
IN GENBANK

| | | | | | | Corixa |
|---|---|---|---|---|---|---|
| | | | | Seq | | Candidate |
| SEQ ID NO: | 384-well | 96-well | Ratio | ID | GenBank | Name |
| 1905 & 1906 | PCX435:r08c15 | 1169:G8 | 3.08 | 96255 | Human DNA of undetermined origin | C618S |
| | | | | | found 5′ to NCA mRNA | |
| 1900 & 1904 | PCX436:r02c12 | 1172:D6 | 3.03 | 96259 | Human DNA of undetermined origin | |
| | | | | | found 5′ to NCA mRNA | |
| 1900 & 1901 | PCX436:r11c10 | 1174:F5 | 3.04 | 96265 | Human DNA of undetermined origin | |
| | | | | | found 5′ to NCA mRNA | |
| 1907 & 1908 | PCX437:r04c21 | 1176:G11 | 2.83 | 96270 | Human DNA of undetermined origin | |
| | | | | | found 5′ to NCA mRNA | |
| 1902 & 1903 | PCX437:r06c19 | 1177:C10 | 2.51 | 96273 | Human DNA of undetermined origin | |
| | | | | | found 5′ to NCA mRNA | |
| 1897 & 1898 | PCX438:r13c05 | 1183:A3 | 3.13 | 96288 | Human DNA of undetermined origin | |
| | | | | | found 5′ to NCA mRNA | |
| 1899 | PCX438:r16c06 | 1183:H3 | 2.96 | 96291 | Human DNA of undetermined origin | |
| | | | | | found 5′ to NCA mRNA | |
| 1909 | PCX438:r13c19 | 1183:A10 | 4.44 | 96290 | Homo sapiens, tumor-associated | |
| | | | | | calcium signal transducer 1 | |
| 1911 | PCX437:r07c10 | 1177:F5 | 3.65 | 96274 | Homo sapiens differentially | G911P |
| | | | | | expressed in hematopoietic lineages | |
| | | | | | (GW112) | |
| 1910 | PCX437:r11c07 | 1178:E4 | 4.86 | 96281 | Homo sapiens differentially | |
| | | | | | expressed in hematopoietic lineages | |
| | | | | | (GW112) | |
| 1913 | PCX438:r06c14 | 1181:D7 | 3.59 | 96286 | Homo sapiens differentially | |
| | | | | | expressed in hematopoietic lineages | |
| | | | | | (GW112) | |
| 1912 | PCX438:r10c03 | 1182:C2 | 2.56 | 96287 | Homo sapiens differentially | |
| | | | | | expressed in hematopoietic lineages | |
| | | | | | (GW112) | |
| 1914 | PCX436:r07c23 | 1173:E12 | 5.69 | 96262 | Homo sapiens, clone | K1593P |
| | | | | | IMAGE:4047062, mRNA | |
| 1916 | PCX436:r07c12 | 1173:F6 | 2.44 | 96260 | Homo sapiens Axin2 mRNA for | C751P/C793P |
| | | | | | conductin | |
| 1915 | PCX437:r09c17 | 1178:A9 | 2.12 | 96278 | Homo sapiens Axin2 mRNA for | |
| | | | | | conductin | |
| 1917 | PCX438:r13c14 | 1183.B7 | 2.39 | 96289 | Homo sapiens Axin2 mRNA for | |
| | | | | | conductin | |
| 1918 & 1919 | PCX436:r08c05 | 1173:G3 | 2.51 | 96263 | Homo sapiens regenerating gene | C887P |
| | | | | | type IV (REG-IV) | |
| 1920 & 1921 | PCX435:r02c19 | 1168:C10 | 2.01 | 96257 | Human DNA of undetermined origin | C618S |
| | | | | | found 5′ to NCA mRNA | |
| 1923 | PCX436:r13c11 | 1175:A6 | 2.55 | 96267 | Homo sapiens lectin, galactoside- | |
| | | | | | binding, soluble, 4 (galectin 4) | |
| 1924 | PCX435:r12c19 | 1170:G10 | 2.16 | 96258 | Homo sapiens cisplatin resistance | |
| | | | | | associated (CRA), mRNA | |
| 1925 | PCX436:r15c20 | 1175:F10 | 2.27 | 96268 | Homo sapiens 12 BAC RP11-704P17 | |
| 1926 | PCX437:r12c23 | 1178:G12 | 2.28 | 96283 | Homo sapiens hypothetical gene | |
| | | | | | supported by BC001314 | |
| 1927 | PCX436:r07c19 | 1173:E10 | 2.02 | 96261 | Homo sapiens ribosomal protein S21 | |

[2304] TABLE 7
cDNA SEQUENCES FROM A SUBTRACTED LCM cDNA
LIBRARY THAT SHOWED NO SIGNIFICANT SIMILARITY
TO SEQUENCES IN GENBANK

| SEQ ID NO: | 384-well | 96-well | Ratio | Seq ID | GenBank |
|---|---|---|---|---|---|
| 1922 | PCX437:r06c03 | 1177:C2 | 3.32 | 96271 | No Match |

### Example 6

### Isolation of Additional cDNAs Encoding Colon Tumor Antigens from Two PCR-Based Subtracted Matched Pair cDNA Libraries

[2305] Additional cDNAs were isolated from matched pair PCR subtracted libraries CMPP8610 and CMPP8612 described in Example 4 and 2 additional matched pair PCR subtracted libraries CMPP104042 and G439. Forty-six clones that were found to be at least 2-fold overexpressed in colon tumor tissues versus normal colon and a panel of other normal tissues, as indicated by microarray analysis, were selected and their sequences were determined. These sequences are set forth in SEQ ID NOs:1928-1973. The sequences were used as queries in a search against public databases. Table 8 summarizes the microarray and Genbank search results for these sequences, all of which showed some degree of similiarity with known sequences in the database.

TABLE 8
MICROARRAY AND GENBANK SEARCH RESULTS FOR cDNA SEQUENCES FROM
SUBTRACTED MATCHED PAIR cDNA LIBRARIES

| SEQ | | | | | | | |
|---|---|---|---|---|---|---|---|
| ID | | | | | Clone | Candidate | |
| NO | Microarray Well | 96-well | T/N | Library | ID | Name | Genbank |
| 1928 | PCX439:r12c10 | 1186:H5 | 3.07 | CMPP8610TD1 | 95022 | | Homo sapiens 15 kDA selenoprotein |
| | | | | | | | mRNA, complete cds |
| 1929 | PCX439:r16c10 | 1187:H5 | 2.23 | CMPP8610TD1 | 95047 | | Homo sapiens capping protein (actin |
| | | | | | | | filament) muscle Z-line, alpha 1 |
| | | | | | | | (CAPZA1), mRNA |
| 1930 | PCX441:r04c21 | 1192:G11 | 2.42 | CMPP8610TD1 | 95053 | | CTA-286B10 on chromosome 22 |
| | | | | | | | Contains the 3′ end of the TOM1 gene |
| | | | | | | | for target of myb1 (chicken) homolog, |
| | | | | | | | the HMOX1 gene |
| 1931 | PCX441:r06c21 | 1193:C11 | 2.22 | CMPP8610TD1 | 95054 | | Homo sapiens clone IMAGE: 1338238, |
| | | | | | | | mRNA sequence |
| 1932 | PCX440:r04c03 | 1188:G2 | 2.35 | CMPP8610TD1 | 95060 | | Homo sapiens Nori-3 mRNA for MAPKK |
| | | | | | | | like protein kinase, complete cds |
| 1933 | PCX440:r14c13 | 1191:C7 | 2.19 | CMPP8610TD1 | 95063 | | Homo sapiens cDNA FLJ12641 fis, |
| | | | | | | | clone NT2RM4001953 MAYBE REG-4 |
| 1934 | PCX439:r07c06 | 1185:F3 | 2.24 | CMPP8610TD1 | 95092 | | Homo sapiens CDC28 protein kinase 2 |
| | | | | | | | (CKS2), mRNA |
| 1935 | PCX440:r11c16 | 1190:F8 | 2.14 | CMPP8610TD1 | 95098 | | Human mRNA for membrane cofactor |
| | | | | | | | protein |
| 1936 | PCX439:r11c12 | 1186:F6 | 2.13 | CMPP8610TD1 | 95105 | | Homo sapiens KIAA0174 gene product |
| | | | | | | | (KIAA0174), mRNA |
| 1937 | PCX441:r03c23 | 1192:E12 | 2.03 | CMPP8610TD1 | 95112 | | Homo sapiens putative mitotic |
| | | | | | | | checkpoint protein kinase (HsBUB1) |
| | | | | | | | mRNA, partial cds |
| 1938 | PCX442:r04c18 | 1196:H9 | 2.13 | CMPP104042 | 95120 | | Homo sapiens poly(A)-binding protein, |
| | | | | | | | cytoplasmic 1 (PABPC1), mRNA |
| 1939 | PCX441:r11c21 | 1194:E11 | 2.33 | CMPP8610TD1 | 95152 | | Homo sapiens sialytransferase 4C (beta- |
| | | | | | | | galactosidase alpha-2,3- |
| | | | | | | | sialytransferase) (SIAT4C), mRNA |
| 1940 | PCX441:r11c18 | 1194:F9 | 2.26 | CMPP8610TD1 | 95153 | | Homo sapiens capping protein (actin |
| | | | | | | | filament) muscle Z-line, alpha 1 |
| | | | | | | | (CAPZA1), mRNA |
| 1941 | PCX443:r07c22 | 1201:F11 | 2.02 | CMPP104042 | 95162 | | Homo sapiens golgi-specific brefeldin A |
| | | | | | | | resistance factor 1 (GBF1), mRNA |
| 1942 | PCX443:r09c01 | 1202:A1 | 2.62 | CMPP104042 | 95163 | | Homo sapiens 12q BAC RP11-186F10 |
| | | | | | | | (Roswell Park Cancer Institute Human |
| | | | | | | | BAC Library) complete sequence |
| 1943 | PCX441:r11c05 | 1194:E3 | 3.41 | CMPP8610TD1 | 95164 | | Homo sapiens, Similar to RIKEN cDNA |
| | | | | | | | 5830420C20 gene, clone |
| | | | | | | | IMAGE:3633379, mRNA, partial cds |
| 1944 | PCX442:r09c10 | 1198:B5 | 2.15 | CMPP104042 | 95169 | C1777P | Homo sapiens, Similar to RIKEN cDNA |
| | | | | | | | 1810037C20 gene, clone MGC:21481 |
| | | | | | | | IMAGE:3852062 |
| 1945 | PCX442:r07c18 | 1197:F9 | 2.47 | CMPP104042 | 95192 | | Homo sapiens testis specific protein, Y- |
| | | | | | | | linked (TSPY), mRNA |
| 1946 | PCX443:r11c14 | 1202:F7 | 2.58 | CMPP104042 | 95212 | | Homo sapiens Kruppel-like factor 5 |
| | | | | | | | (intestinal) (KLF5), mRNA |
| 1947 | PCX444:r11c01 | 1206:E1 | 2:04 | CMP86122 | 95213; | | Homo sapiens, annexin A2, clone |
| | | | | | 96326 | | MGC:23717 IMAGE:4096060, mRNA, |
| | | | | | | | complete cds |
| 1948 | PCX445:r09c15 | 1210:A8 | 2.12 | CMP86122 | 95220 | | (leucine zipper protein)Homo sapiens |
| | | | | | | | KIAA0601 protein (KIAA0601), mRNA |
| 1949 | PCX445:r13c17 | 1211:A9 | 2.38 | CMP86122 | 95234 | | Homo sapiens left-right determination, |
| | | | | | | | factor B (LEFTB), mRNA |
| 1950 | PCX444:r15c11 | 1207:E6 | 2.35 | CMP86122 | 95239 | C1778P | Homo sapiens hepatocellular carcinoma |
| | | | | | | | associated-gene TB6, mRNA sequence |
| 1951 | PCX445:r06c17 | 1209:C9 | 2.19 | CMP86122 | 95242 | | Homo sapiens, CD24 antigen (small cell |
| | | | | | | | lung carcinoma cluster 4 antigen) |
| 1952 | PCX445:r08c04 | 1209:H2 | 2.17 | CMP86122 | 95243 | | Homo sapiens chromosome 3, clone |
| | | | | | | | RP11-48B3, complete sequence |
| 1953 | PCX445:r13c20 | 1211:B10 | 2.23 | CMP86122 | 95246 | | Homo sapiens synaptotagmin-like 2 |
| | | | | | | | (SYTL2), transcript variant b, mRNA |
| 1954 | PCX445:r10c13 | 1210:C7 | 2.03 | CMP86122 | 95256 | | Homo sapiens chromosome 19 clone |
| | | | | | | | LLNLR-224F1, complete sequence |
| 1955 | PCX444:r16c02 | 1207:H1 | 2.08 | CMP86122 | 95263; | | Human Ig J chain gene, exons 3 and |
| | | | | | 96331 | | |
| 1956 | PCX445:r07c05 | 1209:E3 | 2.14 | CMP86122 | 95266 | | Homo sapiens chloride intracellular |
| | | | | | | | channel 1 (CLIC1), mRNA |
| 1957 | PCX444:r12c23 | 1206:G12 | 2.48 | CMP86122 | 95273 | | Homo sapiens SRY (sex determining |
| | | | | | | | region Y)-box 9 (campomelic dysplasia, |
| | | | | | | | autosomal sex-reversal) (SOX9) |
| 1958 | PCX444:r14c04 | 1207:D2 | 2.37 | CMP86122 | 95274 | | Homo sapiens BAC clone RP11549B18 |
| | | | | | | | from 18, complete sequence |
| 1959 | PCX444:r12c12 | 1206:H6 | 2.1 | CMP86122 | 95297 | | Homo sapiens ribosomal protein S24 |
| | | | | | | | (RPS24), mRNA |
| 1960 | PCX445:r01c24 | 1208:B12 | 2.06 | CMP86122 | 95299 | | Homo sapiens desmocollin 2 (DSC2), |
| | | | | | | | mRNA |
| 1961 | PCX446:r01c09 | 1212:A5 | 2.51 | CMP86122 | 95308 | | Homo sapiens, CD24 antigent (small cell |
| | | | | | | | lung carcinoma cluster 4 antigen) |
| 1962 | PCX446:r05c13 | 1213:A7 | 2.38 | CMP86122 | 95309 | C1779P | Homo sapiens cDNA: FLJ22182 fis, |
| | | | | | | | clone HRC00953 |
| 1963 | PCX446:r14c13 | 1215:C7 | 2 | CMP86122 | 95313 | | Homo sapiens membrane cofactor |
| | | | | | | | protein (CD46, trophoblast-lymphocyte |
| | | | | | | | cross-reactive antigen) MCP), mRNA |
| 1964 | PCX446:r08c06 | 1213:H3 | 2.08 | CMP86122 | 95322 | | Homo sapiens epidermal growth factor |
| | | | | | | | receptor pathway substrate 8 (EPS8), |
| | | | | | | | mRNA |
| 1965 | PCX446:r11c08 | 1214:F4 | 2.04 | CMP86122 | 95324 | | Homo sapiens BAC clone CTD-2195F21 |
| | | | | | | | from 7, complete sequence |
| 1966 | PCX446:411c01 | 1214:E1 | 2.18 | CMP86122 | 95335 | | Human CSF-1 receptor (FMS) gene, |
| | | | | | | | complete cds, and (SMF) gene, partial |
| | | | | | | | cds |
| 1967 | PCX447:r03c07 | 1216:E4 | 2.1 | G439 | 95338 | | Homo sapiens CD24 antigen (small cell |
| | | | | | | | lung carcinoma cluster 4 antigen) |
| | | | | | | | (CD24), mRNA |
| 1968 | PCX447:r07c18 | 1217:F9 | 3.28 | G439 | 95331; | | Homo sapiens ubiquitin-conjugating |
| | | | | | 96338 | | enzyme E2C (EB32C), mRNA |
| 1969 | PCX446:r15c02 | 1215:F1 | 2.41 | CMP86122 | 95340 | | Homo sapiens SOX4 mran, 5′ |
| | | | | | | | untranslated region |
| 1970 | PCX446:r09c16 | 1214:B8 | 2.03 | CMP86122 | 95355 | | Homo sapiens histone deacetylase 1 |
| | | | | | | | (HDAC1), mRNA |
| 1971 | PCX446:r15c01 | 1215:E1 | 2.66 | CMP86122 | 95361 | | Homo sapiens eukaryotic translation |
| | | | | | | | elongation factor 1 alpha 1 (EEF1A1), |
| | | | | | | | mRNA |
| 1972 | PCX446:r08c02 | 1213:H1 | 2.8 | CMP86122 | 95365 | | H. sapiens IL-13a mRNA |
| 1973 | PCX446:r09c04 | 1214:B2 | 2.41 | CMP86122 | 95370 | | Human (clone 21726) carcinoma- |
| | | | | | | | associated antigen GA733-2 (GA733-2) |
| | | | | | | | mRNA, exon 9 and compete cds |

[2306] Additional DNA sequence information for colon tumor antigens C1777P, C1778P, and C1779P is set forth in SEQ ID NOs:1974-1976. The protein sequence for C1777P is set forth in SEQ ID NO:1982.

[2307] Three additional clones were identified that were found to be at least 2-fold overexpressed in colon tumor tissues versus normal colon and a panel of other normal tissues, as indicated by microarray analysis. The sequences of these clones, set forth in SEQ ID NOs:1977-1981, were used as queries in a search against Genbank. Table 9 below summarizes the microarray and database search results.

TABLE 9
MICROARRAY AND GENBANK SEARCH RESULTS FOR 3 ADDITIONAL cDNA
SEQUENCES FROM SUBTRACTED MATCHED PAIR cDNA LIBRARIES

| SEQ | | | | | Clone | |
|---|---|---|---|---|---|---|
| ID NO | Microarray Well | 96-well | T/N | Library | ID | Genbank |
| 1977 | PCX503:r11c07 | 1190:E4 | 2.07 | CMPP8610TD1 | 99089 | Homo sapiens BAC clone RP11-525O1 |
| | | | | | | from 7, complete sequence |
| 1978 | PCX511:r15c02 | 1187:F1 | 2.59 | CMPP8610TD1 | 98888 | Homo sapiens, clone IMAGE:4452921, |
| | | | | | | mRNA: Genbank Accession No: BC016592 |
| | | | | | | (set forth in SEQ ID NO: 1979) |
| 1980 | PCX502:r08c09 | 1221:G5 | 2.1 | GSK ESTS | 99074 | Contiged with GSK c77_68 Human DNA |
| | | | | | | sequence from clone RP5-1056H1 on |
| | | | | | | Chromosome 20 (GSK EST seq set forth in |
| | | | | | | SEQ ID NO:1981) |

### Example 7

### Peptide Priming of T-Helper Lines

[2308] Generation of CD4⁺ T helper lines and identification of peptide epitopes derived from tumor-specific antigens that are capable of being recognized by CD4⁺ T cells in the context of HLA class II molecules, is carried out as follows:

[2309] Fifteen-mer peptides overlapping by 10 amino acids, derived from a tumor-specific antigen, are generated using standard procedures. Dendritic cells (DC) are derived from PBMC of a normal donor using GM-CSF and IL-4 by standard protocols. CD4⁺ T cells are generated from the same donor as the DC using MACS beads (Miltenyi Biotec, Auburn, Calif.) and negative selection. DC are pulsed overnight with pools of the 15-mer peptides, with each peptide at a final concentration of 0.25 μg/ml. Pulsed DC are washed and plated at 1×10⁴ cells/well of 96-well V-bottom plates and purified CD4⁺ T cells are added at 1×10⁵/well. Cultures are supplemented with 60 ng/ml IL-6 and 10 ng/ml IL-12 and incubated at 37° C. Cultures are restimulated as above on a weekly basis using DC generated and pulsed as above as antigen presenting cells, supplemented with 5 ng/ml IL-7 and 10 U/ml IL-2. Following 4 in vitro stimulation cycles, resulting CD4⁺ T cell lines (each line corresponding to one well) are tested for specific proliferation and cytokine production in response to the stimulating pools of peptide with an irrelevant pool of peptides used as a control.

### Example 8

### Generation of Tumor-Specific CTL Lines Using In Vitro Whole-Gene Priming

[2310] Using in vitro whole-gene priming with tumor antigen-vaccinia infected DC (see, for example, Yee et al, The Journal of Immunology, 157(9):4079-86, 1996), human CTL lines are derived that specifically recognize autologous fibroblasts transduced with a specific tumor antigen, as determined by interferon-γ ELISPOT analysis. Specifically, dendritic cells (DC) are differentiated from monocyte cultures derived from PBMC of normal human donors by growing for five days in RPMI medium containing 10% human serum, 50 ng/ml human GM-CSF and 30 ng/ml human IL-4. Following culture, DC are infected overnight with tumor antigen-recombinant vaccinia virus at a multiplicity of infection (M.O.I) of five, and matured overnight by the addition of 3 μg/ml CD40 ligand. Virus is then inactivated by UV irradiation. CD8+ T cells are isolated using a magnetic bead system, and priming cultures are initiated using standard culture techniques. Cultures are restimulated every 7-10 days using autologous primary fibroblasts retrovirally transduced with previously identified tumor antigens. Following four stimulation cycles, CD8+ T cell lines are identified that specifically produce interferon-γ when stimulated with tumor antigen-transduced autologous fibroblasts. Using a panel of HLA-mismatched B-LCL lines transduced with a vector expressing a tumor antigen, and measuring interferon-γ production by the CTL lines in an ELISPOT assay, the HLA restriction of the CTL lines is determined.

### Example 9

### Generation and Characterization of Anti-Tumor Antigen Monoclonal Antibodies

[2311] Mouse monoclonal antibodies are raised against E. coli derived tumor antigen proteins as follows: Mice are immunized with Complete Freund's Adjuvant (CFA) containing 50 μg recombinant tumor protein, followed by a subsequent intraperitoneal boost with Incomplete Freund's Adjuvant (IFA) containing 10 μg recombinant protein. Three days prior to removal of the spleens, the mice are immunized intravenously with approximately 50 μg of soluble recombinant protein. The spleen of a mouse with a positive titer to the tumor antigen is removed, and a single-cell suspension made and used for fusion to SP2/O myeloma cells to generate B cell hybridomas. The supernatants from the hybrid clones are tested by ELISA for specificity to recombinant tumor protein, and epitope mapped using peptides that spanned the entire tumor protein sequence. The mAbs are also tested by flow cytometry for their ability to detect tumor protein on the surface of cells stably transfected with the cDNA encoding the tumor protein.

### Example 10

### Synthesis of Polypeptides

[2312] Polypeptides are synthesized on a Perkin Elmer/Applied Biosystems Division 430A peptide synthesizer using FMOC chemistry with HPTU (O-Benzotriazole-N,N,N′,N′-tetramethyluronium hexafluorophosphate) activation. A Gly-Cys-Gly sequence is attached to the amino terminus of the peptide to provide a method of conjugation, binding to an immobilized surface, or labeling of the peptide. Cleavage of the peptides from the solid support is carried out using the following cleavage mixture: trifluoroacetic acid:ethanedithiol:thioanisole:water:phenol (40:1:2:2:3). After cleaving for 2 hours, the peptides are precipitated in cold methyl-t-butyl-ether. The peptide pellets are then dissolved in water containing 0.1% trifluoroacetic acid (TFA) and lyophilized prior to purification by C18 reverse phase HPLC. A gradient of 0%-60% acetonitrile (containing 0.1% TFA) in water (containing 0.1% TFA) is used to elute the peptides. Following lyophilization of the pure fractions, the peptides are characterized using electrospray or other types of mass spectrometry and by amino acid analysis.

[2313] From the foregoing it will be appreciated that, although specific embodiments of the invention have been described herein for purposes of illustration, various modifications may be made without deviating from the spirit and scope of the invention. Accordingly, the invention is not limited except as by the appended claims.

The application's sequence listing, which the Patent Office published only in electronic form, follows.

SEQUENCE LISTING (1982 sequences)

SEQ ID NO: 1 - DNA, 656 bp, Homo sapiens
  misc_feature 544, 560, 627, 635: n = A,T,C or G
cctccacaaagtgtctgtgctgttgctgttctccaagccagtcttcatgtgtagggtggggggtgaggacacactttcgggctctgcagggaggccagaagtattcttccctccatcaatagctttcttgttggaaaggagggaatcctttatttcagagtcaataacaatcttaaggacatctggctcagaggctggttctgcaagttgtttttcattctcagaaaagtcatcgtcttccaagtgcaagaggaggggactgatagagtcactctccccttgaacatcaggcaactctttcaaaccagttcccaagtgctcaacctggaaagttgctctgcttccaggaggaaccttactaataaaagcccgccgagcatcccctgggaactctgtatccatagagctgggtagttcagccaggccaacagagtcatcatttagttgttgattaagaaaggcaatttcattgagcagtgaagtcagtgtctcatcagtatcatcctcatcttccatgttaggtcagcagttcactggaatcaanactgcttcctctatanctgatgttactttcctcagttccatctctatgctttgaagcccttgaaaactttcatcttttatttntgaaaaangaagaatcctttgaatttcac

SEQ ID NO: 2 - DNA, 373 bp, Homo sapiens
ctgtcccatggggtccttattgtaatctagaccatcttgttctagatgggcacttaagccctgtttcttcatagtctgttatgctgtcatttggacctggatgcttcctgtttcttccagcaatttttgtttgtgttttttgttgttgaagagaggaacatttaaggagttagataaactggtaattttcagatgtgtagaaaattgcataggtggtgaaagccaatgccataggctctgaaattttactatttcctacatcaggaaatgtgtaccaaaagtgctaaaatgccaagaataattttgagtatctaaagatagataaatcttttcatctgagtggaaatggcattatgactttatattctcatgg

SEQ ID NO: 3 - DNA, 642 bp, Homo sapiens
  misc_feature 541, 598, 621, 639: n = A,T,C or G
gtgctgtgtgtaagtggagaacttggggatagaggaggaagctcctcgtggcccttccaaggtgaggcaaaggcatctggacttgttccagcccagcccaccgggtgacatcaccgggcagggaggggtgctggtggtggttcatacggagtaagctgctctgcctgtgtgagtggctcctgggccctaaacaggcacctttaggccatgggtcactcaccgtgagccatcaatgtgctctggtctgacatggtttctctctgtcttctagtctagacctagtttttttgttctgttccccacgtatggatatagtagagattgttgtctgtgaaatttctcttttgtagattttgagttttcccttgtagtgtaaagaatgatcactttctgtaacaataacaagaccactttttaagatttatcctgtttgttctttgttgattgaaacataataattgttaaaattctctacagccttctttttcttccatagctaatcttccttctaatagtttttgctttctgttttgctgttgtncttttgcaaagctttcccctcatagcctgtacctgttatcaatataaaaataatctncctgtgggaatgcttcattgacntgaatttctcctttgganaaa

SEQ ID NO: 4 - DNA, 575 bp, Homo sapiens
  misc_feature 492: n = A,T,C or G
ctggaagccagttcccagaagaccaaactgcatgccccaatcgccaaggtaatttattcttattacttgatgtcctaaagcttctttgagatttgctataaaatttcctatgatggtagaacgcaaatgtccaacatgaaattttttggcaacattaggtgaactgaattcaaccacaatcttcttctggggaagtccagagaaaagttcactttttaatccatattttgagccatcttcaattacttgttgtagcactgtctttgttaagagctctctgtttattttgaaatttacagtcctttgaccagtactgatttcactcaccactgtatcacatcttagcttctctgctagtctcttggcttgaacttgaatatctggtcttgaatggtcattgtctttttccaataaagaatccacagaaagctgaaaatcagctacttcttctttttgggaaattggaactgcagatattgatgtgatcaagtnttctggtggaagattcaacactctggaaagctggcaagcaatagcgcggcgaaagccgcacgccatgtccacctctacgggaa

SEQ ID NO: 5 - DNA, 558 bp, Homo sapiens
caagaaaaagcggatggtggttcctgctgccctcaaggtcgtgcgtctgaagcctacaagaaagtttgcctatctggggcgcctggctcacgaggttggctggaagtaccaggcagtgacagccaccctggaggagaagaggaaagagaaagccaagatccactaccggaagaagaaacagctcatgaggctacggaaacaggccgagaagaacgtggagaagaaaattgacaaatacacagaggtcctcaagacccacggactcctggtctgagcccaataaagactgttaattcctcatgcgttgcctgcccttcctccattgttgccctggaatgtacgggacccaggggcagcagcagtccaggtgccacaggcagccctgggacataggaagcttgggagcaaggaaagggtcttagtcactgcctcccgaagttgcttgaaagcactcggagaattgtgcaggtgtcatttatctatgaccaaataggaaagagcaaccagttactatgagtgaaagggagccagaagactgattgggagggccctatcttg

SEQ ID NO: 6 - DNA, 451 bp, Homo sapiens
  misc_feature 24, 301, 306, 375, 430: n = A,T,C or G
cctggcagggaatgcaattctcanagaagacaaagacccgcaaaagatgtatgccaccatctatgagctgaaagaagacaagagctacaatgtcacctccgtcctgtttaggaaaaagaagtgtgactactggatcaggacttttgttccaggttgccagcccggcgagttcacgctgggcaacattaagagttaccctggattaacgagttacctcgtccgagtggtgagcaccaactacaaccagcatgctatggtgttcttcaagaaagtttctcaaaacagggagtcttcaagatcnccctntacgggagaaccaaggagctgacttcggaactaaaggagaacttcatccgcttctccaaatatctgggnctccctgaaaaccacatcgtcttccctgtcccaatcgaccagtgtatcgaccggntgagtgcacaggtgccggcag

SEQ ID NO: 7 - DNA, 555 bp, Homo sapiens
  misc_feature 293, 469: n = A,T,C or G
gcatatttaatgcacacatttgaatgttacacataaataattttaacgatggagtccaagttctggattttacattagatctgcatatataagacacttgtggtcaaatttcaagattggtaaagccagtttcaagctgcttatattttgagtacaggtttcactattacaaatgtatgatgttaaactaacaaactcatgaccttcaaagatgtcttcgtcccacgcacacacatttgtaatttgtgtccatttgctatttcccttcttctataatcttcaaattatatagntatgcattgagttccctatgcatctcacccatctcctttatctcagccttctcatactttgccattctcttctttctggaaataaccagcacaacaattccagcaacaactgctatcaccacaaccacaataacaggcaataacaccagcttttagaccctgcattgagaattcangtgctttttcatcaacataataaattaaagtttgaccaggatccagatccagttgttccccatttactgtcaggtccattttctta

SEQ ID NO: 8 - DNA, 277 bp, Homo sapiens
  misc_feature 51, 76, 96, 118, 124, 163, 172: n = A,T,C or G
gtggagcagctcctgtacgaaagccctgagcggtactcccgctcagtgctnctcatcacccagcacctcagcctgntggagcaggctgaccacatnctctttctggaaggaggcgctntccggnaagggggaacccaccagcagctcatggaaaaaaaggggngctactggnccatggtgcaggctcctgcagatgctccaaaatgaaagccttctcagacctgcgcactccatctccctcccttttcttctctctgtggtggagaaccacagagta

SEQ ID NO: 9 - DNA, 474 bp, Homo sapiens
  misc_feature 431, 446, 464: n = A,T,C or G
cctgcatggattccatgttcatgagtttggagataatacagcaggctgtaccagtgcaggtcctcactttaatcctctatccagaaaacacggtgggccaaaggatgaagagaggcatgttggagacttgggcaatgtgactgctgacaaagatggtgtggccgatgtgtctattgaagattctgtgatctcactctcaggagaccattgcatcattggccgcacactggtggtccatgaaaaagcagatgacttgggcaaaggtggaaatgaagaaagtacaaagacaggaaacgctggaagtcgtttggcttgtggtgtaattgggatccgcccaataaacattcccttggatgtagtctgaggccccttaactcatctgttatcctgctagctgtagaaatgtatcctgataaacattaaacacttgnaatcttaaaagtggnattgtgtgactttttcanaagttgcttt

SEQ ID NO: 10 - DNA, 513 bp, Homo sapiens
  misc_feature 499: n = A,T,C or G
cctataccattcaaggacagtatgccattccacagccagatttgaccaagctgcaccagttggcaatgcaacagtctcattttcccatgacgcatggcaacaccggattcagtggcattgaatccagctctccagaggtgaaaggctattgggcaggtttggatgcatctgctcagactacttctcatgaactcaccattccaaacgatttgattggctgcataatcgggcgtcaaggcgccaaaatcaatgagatccgtcagatgtctggggcgcagatcaaaattgcgaacccagtggaaggatctactgataggcaggttaccatcactggatctgctgccagcattagcctggctcaatatctaatcaatgtcaggctttcctcggagacgggtggcatggggagcagctagaacaatgcagattcatccataatccctttctgctgttcaccaccacccatggatccatctgtgtaagtttctgaacagtcagncgattccaggtttt

SEQ ID NO: 11 - DNA, 606 bp, Homo sapiens
  misc_feature 365, 433, 507, 549, 591: n = A,T,C or G
ctgtctcccacccttgctgtgttgagtctgcgagcctgggatatgctaactcgggggtgatacaacctggaagaagaatgtgaggctctcctggaaagatgcaaaaaccatctcagatccaaggggccaagatcacaaggtcctgctgctacctgaggggtctgaagctttgagggcaggggctggggagtcacaatcctgtgaggcagggagagggaagagtcacaaacccaactcagcgctattctttagccctaggcgctttcactcctcagtgccctagaagtcaccagtaggtgtcaactgggcagacaagggacaggaagacagggatggcccagggctttttacccgtttggttttangcccgtttctccattaagggatgcagaggcaggggtggagtgagtgaatgaatgagtcacatctccanaacagcaggaaggaacagcctctgctggcaatgacagttccccagatgagatccctggggctctgaaagggaanggcaagattcccccccccaaatgccccgggattagggggcanatctgaagggaattcacaaaggggcagccacagggagtgtcntaccttcgggccggc

SEQ ID NO: 12 - DNA, 549 bp, Homo sapiens
  misc_feature 34: n = A,T,C or G
aaaaaagaaaaagtgtttattataggcaacaacnccaatgggaactggtatttgtctacaccaagggagtgcaatttttcatcttccaatggcggcctcaaccttgaggcgaatccactggcgaaagatgcctttctaggaagcagagctccctgactgggctaagatagttcagattgatcttaggtcaatggtaagacctatgtagttcatgaagtcttggcttttcggcgctgggtcgcccaaagcagaatggagacggatagagtggtggctcccagaatcccgaagaacataagcagtgagaacgagccctggcgcatacacttgtatccatggaaaccatcagcacaaacacactgcaaaagacctggaccatcaggtacacaagatccattctcaggacacatttctgggtccccagtgttattgcaaaggttcttttgcccttgacagatttggttgtctatataagaggtgatagtattccagcattaattcctccaggacagttgacatgttgtggcagtatcagagtctggagctgag

SEQ ID NO: 13 - DNA, 723 bp, Homo sapiens
  misc_feature 594, 603, 620, 665, 708: n = A,T,C or G
ctgggagcctttgccatggtacttaggtagggtgtgtgcccccagatttaaccattccataatcatgttagagttacttctataaagtgaacagattttattaatcacggcttttggtgaatttgtttaaggttaattatggtagcaaattttgggcctaaacattatttttctgtatcccgctgtaattcccaaaactctcattattctctaactattacacatgggcatattctgatgtttctcatcctttgccagaagactaccttacatccatcgtaattgttctctaggaaaagagaacttttttcaaaattcaaaatacttcttaaggatggcacagtaccatataactggagtaataaaacatgagcttacattcttacaataactaaaccacttaaaatgatcaaggcactaatgttttggtctgaaaagctgtgtactttatagacattttcagacatttttggaaatttccattaaaggtggaaaatctatttttttcctcctttgcagtgtcttagtttgaatgaaacacttcgaagttctagaaattctagaaagagccttaatgtatttgatgtattctgngataaagangtactaatagtatccancacagatttgcttttctttgctagcacaatgtggtgttgctgcanaatattctttttatattctgtggaaaaaataaaggaaattcanaatggttacctgccc

SEQ ID NO: 14 - DNA, 637 bp, Homo sapiens
aaaatgttttatttcatagctcataaaaaagtatgtatgtacaagactcaagtaaatagaaaggcagctttcaatcacaaatcagtttttcagattttactgtggaagcatatttaatgcacacatttgaatgttacacataaataattttaacgatggagtccaagttctggattttacattagatctgcatatataagacacttgtggtcaaatttcaagattggtaaagccagtttcaagctgcttatattttgagtacaggtttcactattacaaatatatgatgttaaactaacaaactcatgaccttcaaagatgtcttcgtcccacgcacacacatttgtaatttgtgtccatttgctatttcccttcttctataatcttcaaattatatagttatgcattgagttccctatgcatctcacccatctcctttatctcagccttctcatactttgccattctcttctttctggaaataaccagcacaacaattccagcaacaactgctatcaccacaaccacaataacagcaataacaccggcttttagaccctgcattgagaattcaggtgctttttcatcaacataataaattaaagtttgaccaggatccagatccagttgtccccat

SEQ ID NO: 15 - DNA, 561 bp, Homo sapiens
  misc_feature 33, 39: n = A,T,C or G
ggtactctcagtgtgttctggtcatcttgtggnttagtngtagaagcaggtgtgtctcttgcctctgcttgcctcctactgcacactcagcacccaggactggaatcaccgactactgaatctcctacatgtattgctgctacttcaagctcctccacttgaaaccttatgattttcccaaggggagatgggacagtgtcatctaaatattccgaatgtttggccttctgagaaaagagcttctagtaattgaaccatgggaaacccagcttctggagggttggccgtggggctgtgtacatgtgtgtgcccaggggtgagtgtttctcaggattcctaacgattcaaattaccgttgagtatatataaagaatgagtctctgtatggaagaacaaatgtgtgcattcacccccagtcacaatggtctccattgcatttcaaaggagaggatcagactatctgaatataaacacaatctgatgttaatttattctaagaacaccatcattttgattgtcctaaagaattctgcctttgtgaataccgtgttaaattttttt

SEQ ID NO: 16 - DNA, 592 bp, Homo sapiens
  misc_feature 40: n = A,T,C or G
aaatattctagtgctttcatcaggacgcttgtattggggncaaaaaacctcagggtaagccactttaagataagatccaggcaaccaataactccttctttttcactctccaagtgatcaaccataacagcaagggctttgttatgatgctgaaagtctaagtgaaacatctcatcttgtaaccatttagccacacagctagacatttgagtctttagttgctcaatgtattcatcccgtggggtagtaaaattccactttagcaccttcaatcctttttcatctttcatcctttgctcttttccatttggaacaacaataaaaataggcccggatttgtcttcatcctcctttaagctggttttgcttggcatcttcttcccttgtgcactctttgctttagaggataatcctggagctttggccttttttggatcaggtttgggttctgtactgctggaaatacaatcttcagcaggtgctgatgcaggctggaatttggctggagcggaccctcccattggtttagaagttgctttagtgggtggagcaggcttggctggcatgttaactttggctttctctagcatgg

SEQ ID NO: 17 - DNA, 459 bp, Homo sapiens
attgtcctaggtgagaggatccattcccaaaacggactggggcaaaaactgagaagtaggtagatccttgatggtctgtattgccccggatcctcttaggtctcgcaggctgtctatggcttgctctggtgatattgtgtcagataggtatagtaggagacaagcagctacaagacaagatctcccaagtcctccatagcagtgtattaaggtttttcggtaatttttaaggcaggttgtaagctcttccattatttcacagcagctggctatgtcaggagtccctccatctgcgattggatgatgatgggtgataattccacattgctggtagagatccagaaggtttgggactctatattttgacagttcccctctggtgcagaaaacaaatatgtcttgtataccacagctctttagttcttctgtatctttttggacatttcttctaacatcttt

SEQ ID NO: 18 - DNA, 104 bp, Homo sapiens
  misc_feature 54, 74, 88, 94: n = A,T,C or G
aaaaactgttactccccctcacccactccctccttccccatttgttcccttcanactcaggggcttcaccaatnccatcccaaaacanggtcanacactgccca

SEQ ID NO: 19 - DNA, 501 bp, Homo sapiens
  misc_feature 430: n = A,T,C or G
cctgggcttgaaatttgctgagctggtgtataccggtttctggcacagccctgagtgtgaatttgtccgccactgcatcgccaagtcccaggagcgagtggaagggaaagtgcaggtgtccgtcctcaagggccaggtgtacatcctcggccgggagtccccactgtctctctacaatgaggagctggtgagcatgaacgtgcagggtgattatgagccaactgatgccaccgggttcatcaacatcaattccctcaggctgaaggaatatcatcgtctccagagcaaggtcactgccaaatagacccgtgtacaatgaggagctggggcctcctcaatttgcagatcccccaagtacaggcgctaattgttgtgataatttgtaattgtgacttgttctccccggctggcagcgtagtggggctgccanggccccagctttgttccctggtccccctgaagcctgcaaacgttgtcatcgaagggaagggtggggggcag

SEQ ID NO: 20 - DNA, 362 bp, Homo sapiens
ccagtttgtgcagttccagtagtgactgattcacatttttttccaaatgtaatgcacactccattgcattcagcccgctctcccagtcatcacagtctggtttcttgatatcctgaaggaagattcggccacctcgttggttctgcagcttcatcagtttctcagcatgttccctctcctcatgagattggtgaagaaagtatttggcaaagttcttcaaagccacatcatcgcggtcaaagtagtaagacatgggcaggtaaacgtaggaggcgtagagctccaggttgatctggcggttgatggcggcctctgagtcctggtggtagttctggcgcacctgcgaggtggacgcggtcgtc

SEQ ID NO: 21 - DNA, 463 bp, Homo sapiens
ctgatctacgagtctgccatcacctgtgagtacctggatgaagcatacccagggaagaagctgttgccggatgacccctatgagaaagcttgccagaagatgatcttagagttgttttctaaggtgccatccttggtaggaagctttattagaagccaaaataaagaagactatgctggcctaaaagaggaatttcgtaaagaatttaccaagctagaggaggttctgactaataagaagacgaccttctttggtggcaattctatctctatgattgattacctcatctggccctggtttgaacggctggaagcaatgaagttaaatgagtgtgtagaccacactccaaaactgaaactgtggatggcagccatgaaggaagatcccacagtctcagccctgcttactagtgagaaagactggcaaggtttcctagagctctacttacagaacagccctgagg

SEQ ID NO: 22 - DNA, 608 bp, Homo sapiens
  misc_feature 598: n = A,T,C or G
cctgtcctctgggagtgacctttattagtccaccccttggagctagacatcctgtacttagtcacggggatggtggaagagggagaagaggaagggtgaagggaagggctctttgctagtatctccatatctagacgatggttttagatgataaccacaggtctacaagagcgtttttagtaaagtgcctgtgttcattgtggacaaagttattattttgcaacatctaagctttacaaatggggtgacaacttatgataaaaactagagctagtgaattagcctatttgtaaatacctttgttataattgataggatacatcttggacatggaattgttaagccacctctgagcagtgtatgtcaggacttgttcattaggttggcagcagaggggcagaaggaattatacaggtagagatgtatgcagatgtgtccatatatgtccatatttacattttgatagccattgatgtatgcatctcttggctgtactataagaacacattaattcaatggaaatacactttgctaatattttaatggtatagatctgctaatgaattctcttaaaaacatactgtattctgtgctgtgngtttcatttt

SEQ ID NO: 23 - DNA, 722 bp, Homo sapiens
  misc_feature 638, 663: n = A,T,C or G
aaaagaacatgaggtcaaaaatcagagctcgaaaatctactgcttcatagctgtgtgaccacaggcaaattctttttgcctcagttttttcatcctaataatgaagaatatcttatttgctttggagggctataagacatgatgagatataataaacataaggcactgagatacatcatagacacttaattgttgttagctattatattacttatcttagggttttccttcatggtattttgttggaaatgataaaaaaataaaacaaatatgtaagggcttgtaaaacccaagattcagtatacctactgcttctagctttaattctaggctctgccatagttaggatgtttactcatctgtagttcaaaactcacacagctcaagactgacacagctcacaattcagaagtcatgtaggcacctcacagcctcgttccttgcccagtctccaaactcactccttccttgactgtgtttctaatactcaggctagaggacagcaggctctagccttctcattatgtatataatgagaatactgtatttcatttaggccagaggaaagtagacacatataatctgagaataatttattcctaggctataggaatctaccatgagcttattcaatgganggacttgaggaaaagcacacccacnaaaatcaatgcattaccttaactttaataagcttctgcggattcttctcctaccccggt

SEQ ID NO: 24 - DNA, 556 bp, Homo sapiens
  misc_feature 37: n = A,T,C or G
aaaaagcctcttcctgatgatcccaactcagaggtcngtgtttaccaaacaccttggtcataataatgtcattagtttctccatttttattttctgaactgtacattcacaacttatgtttctttgagattaatagatattgggggaaaaacgcctttttaggaaaattatagtgaaaatttgacagttgattggcataatttcttgtttgaatgctgcctccattatataggtccttccaggaactcaaacactgtaagtgaaatatgggagtatagtttttattatttcttcttttccttttgttttcataatataatgcagtttgttcaggaaatcagcacaaagcctgatagtactttactaaaatgactgcattctttggattccttcagtctatggttcaagtcactaaagattcatttttgttgagtccttatgagaaacagtagtatgaatcttgacggtttctgcccgtcctaatggcagagctctctgacttgggtgtatgctgccaggctgggtactttcatactttgttttcttgttttgcttt

SEQ ID NO: 25 - DNA, 436 bp, Homo sapiens
  misc_feature 301: n = A,T,C or G
aaagttctctccactcttcaagcctcgaccaccagataccaccactttggcacctgttagctctggtcgatcactttttgttaatttctggtcaagccactctgatatttccactggtgaagtacttgatgccttttctgaactggcactaccgccacttgttgctgcagcatcaaaggatgttccacggacagaaaacactttcactttctcatcacacttcactgtacatagagcatttcctgcataaatagttctcacaaatgtgtcaggtgacttgattgcaatgatgtcagaaatnggggcaacctcaagtttggctgctactctgggcaaaaggttctttccgaaggcagatgctccagcacagatgtgtgtgtaattgaactgcttctgagttgccaaaatcaatggtgtcagttcctctggaagtagg

SEQ ID NO: 26 - DNA, 709 bp, Homo sapiens
  misc_feature 39, 588, 609, 669, 687: n = A,T,C or G
ctgtaaggaacttcacccggatgaaattgacaccgactntgcctacattcttttctatgagcagcaggggatagactatgcacaatttctgccaaagactgatggcaaaaagatggcagacacaagcagtatggatgaagactttgagtctgattacaaaaagtactgtgtgttacagtaaagctaccactctggctgctagacagcttggcggtgagggagatgactccttgtagctgacatttggcaaaagcgtcactgaaaggcaagctaaatgtagttattttatcctgtggccctgaagcacaaaataaaaattctaattaaaatagttaactttaagagtagtaatcattttattttgaagtctcatacaagctctccgatagagaactttcaggcagatcccaccattagcctgtaaacaaaaggtttggcaccagccacctgggaccaaataagaattcaattgtgcttgtccagatatgaacaaatatgtagtgagtatagagtttaccataatcataacaaatattaaagatttccttggagtcaaagtaaaaaacaaacaattataatgttgtctanggacgacatgatatgctcctnctttttcctgaagttttattcattatattgacaagatggagaaagcaagatcacgaaggngtgccaatgatcttaagnatggccaaggattttcatttat

SEQ ID NO: 27 - DNA, 689 bp, Homo sapiens
  misc_feature 605: n = A,T,C or G
cggaagtgtaggttacggtctgagacatcaccgccaagctgggcatcggggagatggccgagactgaccccaagaccgtgcaggacctcacctcggtggtgcagacactcctgcagcagatgcaagataaatttcagaccatgtctgaccagatcattgggagaattgatgatatgagtagtcgcattgatgatctggaaaagaatatcgcggacctcatgacacaggctggggtggaagaactggaaagtgaaaacaagatacctgccacgcaaaagagttgaaggttgctaataatttatactggaatctggcatttttccaagccaagagaagatcgaatggctttttgcagctaactactatgtgtagacaggttttatattataaagtatgcattcttatcacctagtatatagttagtttgtagagtgatttccccccagtttcttgaacatggtatcttcacatcttggaccttggtcagttgtgctattcattattaaacactaaaactttggcggttcttgcataacattgtcagattttttagtgtatttctgtgaagtcattttttttcttgtcattccttttgtagtagttgntgtttggataaaagttgatgtgtgattttttattaacaaatagtaacccttcaattatagttagtctttggtgaaataagatgt

SEQ ID NO: 28 - DNA, 619 bp, Homo sapiens
  misc_feature 578, 595: n = A,T,C or G
ccagtggaccagggagttgggggctgcaagcagggctgctgcggcgagagagctgctgaagtcggtggctcggggcgggatgcgcgcgccaggggtctcccgccattatttcctcaggcatgtggcgtcatagtagaattaatcaaaagcaagaaaatggctggaagagctgtcttgttggcaggacctcctggaactggcaagacagctctggctctggctattgctcaggagctgggtagtaaggtccccttctgcccaatggtggggagtgaagtttactcaactgagatcaagaagacagaggtgctgatggagaacttccgcagggccattgggctgcgaataaaggagaccaaggaagtttatgaaggtgaagtcacagagctaactccgtgtgaggcagagaatcccatgggaggatatggcaaaaccattagccatgtgatcataggactcaaaacagccaaaggaaccaaacagttgaaactggaccccagcatttttgaaagtttgcagaaagagcgagtagaagctggagatgtgatttacattgaaagccaacagtgggggccgtnaaagaaggcaagggcanggtgtgaataccctatgcccacca

SEQ ID NO: 29 - DNA, 535 bp, Homo sapiens
cctgaatgctcagtgccttatttggctttcaggggtcttgcggtgtcacccaggctagagtacagtggtgcaatcatagctcactgctgcctcaaactcctagactcaagcgatcctcctgcttcagcctcccgagtagctgggactacaggtagatgatgggctccacgggaacagagcaaacgttcgctcctgctcctacacggtgtttcctctaaacctgaggctcagccgacttgtcatcacttaaaacccaattcagagcggggggcactgccagtgaatagttcatcaccgactcagtttccccatgtgtatgctgtggtattggatcagcaacgagataagaagatctctcccatttccaagcgtctatgatgattctgaggcacaaggtcacatttgacagtactaggaaacccaggaaacaagaagcaaggatgacaaaggctgtgtctgcctgggcagacgatctatttggacaagataatagacccaggcatggacatgctctccaagaaagatgccctgacag

SEQ ID NO: 30 - DNA, 456 bp, Homo sapiens
  misc_feature 345, 415, 416: n = A,T,C or G
cctgcagcctacctgaccatctctttagctgtcaccaagaaaataaaccccactgtctctctagcttggcccttgtctttcccttgcccctgccatagcatgttcattaggggattccttcctccccttcatctcacaggggaagggagaggaaagagttgttctcccactggaaggggttctgccttctgaggtgacatccaggaagctgtccccattcccttctcctttagatgctagaaacacattttgattctgatcatggggtgggggagagaggaaaggagggaggggagaagcccagcagaagctgagccaggcagaggggaaagaagctgatatgangaagggtctgacaggccacagcccttgcagccggagggctttcccacactcaagagaggggccttacagnncctctgacacccctcccccttcccctcgctccctttgttg

SEQ ID NO: 31 - DNA, 495 bp, Homo sapiens
ttggacccaagagaagactgcagcagactacacagtacttcttgtcaaaatgattctccttcaaggttttcaaaacctttagcacaaagagagcaaaaccttccagccttgcctgcttggtgtccagttaaaactcagtgtactgccagattcgtctaaatgtctgtcatgtccagatttactttgcttctgttactgccagagttactagagatatcataataggataagaagaccctcatatgacctgcacagctcattttccttctgaaagaaactactacctaggagaatctaagctatagcagggatgatttatgcaaatttgaactagcttctttgttcacaattcagttcctcccaaccaaccagtcttcacttcaagagggccacactgcaacctcagcttaacatgaataacaaagactggctcaggagcagggcttgcccaggcatggtggatcaccggaggtcagtagttcaagaccagcctgg

SEQ ID NO: 32 - DNA, 648 bp, Homo sapiens
  misc_feature 434, 604, 622: n = A,T,C or G
tggcagccaaaagatttttcttagtgctttggagacattgcataggtgtaaaattaagataccagaacttcattctgttcttgttgaagctgttgttgtggtgattcatgagcagtaagctggagttagagtggaagaagggtttaccaaaattcttcctacagactagttgcttacagggtttctttgagaggcttaaaaatttcaaaagtattatttaagccactctaaccctgcatgaaaaattggagttagaaatactgatttctgagaccacgtataccagtgaaaattagcttctgagtaaatttctaatttatgccctgccttatttagcctcgctatatgtaacacatggattattttttccctctagtttttaactatatcctagattaaaaccagcatatgctaagaatgtttttacattctgnttcctcctgtgatctttctgaaccaataataaacagtcaactgtgatgctttttagtatgaacaatgataagttttctaaaatctgaaaatcaatacctgagtatgtgatgccggcaatgcattcttctagataagcactaaaccaaagtatggaccctccatttattgnctttaagatttacccccncccgggcgggccgcttaggggccgaa

SEQ ID NO: 33 - DNA, 489 bp, Homo sapiens
  misc_feature 39: n = A,T,C or G
aaacatgagtagatctatgacttctcaaagccgggtcangaatgtccataaaatgctaggcattcctatttccaatattttgatggttggaaattatgcttcagatttggaactggaccccatgaaggatattctcatcctctctgcactgaggcagatgctgcgggctgcagatgattttttagaagatttgcctcttgaggaaactggtgcaattgagagagcgttacagccctgcatttgagataagttgccttgattctgacatttggcccagcctgtactggtgtgccgcaatgagagtcaatctctattgacagcctgcttcagattttgcttttgttcgttttgccttctgtccttggaacagtcatatctcaagttcaaaggccaaaacctgagaagcggtgggctaaaaaaagggcctactgcaaaccacccctccatatttccgtaccatttacaattcagtttctgtgacatcttttt

SEQ ID NO: 34 - DNA, 501 bp, Homo sapiens
ccagagtattcacagagagccaaatctgtcactggcaaaccgcctttactacctctaacctgcagaagacgatgcagccgcttttctttttgaaatgactttgggatttttttaagcttttatttactttttttttaactgttatctttctggatgaaacttgggaaggggattaggagatctagcattttatttctagcattgctattcaccggcttccttattttatatgtaaaaattaagattttatattttatcttcttgtttctcatagatattttgtgagcatttttttgtttattttgaagaaatgtggataagatacttggtagtataaaacagactctctgagagtatttgaaatgtgtttggagatttacttaaacgtactttcaggagtgagcaagtcctacttataaacctatattaactttatttttgagatacctgttttgaatttacctgccccgggcggccggctaagggcgaaatctgcagaat

SEQ ID NO: 35 - DNA, 558 bp, Homo sapiens
  misc_feature 477, 529, 543: n = A,T,C or G
ttgaatgaattaatgatggcttctgagtcaactttactggctcaggaaccacgagagatgactgcagatgtaatcgagcttaaagggaaattcctcatcaacttagaaggtggtgatattcgtgaagagtcttcctataaagtaattgtcatgccgactacgaaagaaaaatgcccccgttgttggaagtatacagcggagtcttcagatacactgtgtcctcgatgtgcagaagttgtcagtggaaaatagtattaacagctcactcgagcaagaaccctcctgacagtactggctagaagtttggatggattatttacaatataggaaagaaagccaagatttaggtaatgagtggatgagtaaatggtggaggatgggagtcaaaatcagaattatagaagaagtatttcctgtaactatagaaagaattatgtatatatacatgcagaaatatatatgtgtgtgtgtatctgnggatggatatatgtatatctcttcctatatatatccatagtggacttattcngaacatagatatgnattcaggcttgtctt

SEQ ID NO: 36 - DNA, 491 bp, Homo sapiens
  misc_feature 416, 445, 467: n = A,T,C or G
aaagaataaacatttaatgtgagtaacattttggttaaaataaatatcatagtaaatgttaacagcaacacctgaagtatatggatacaagaaaggtgttttgtaatagatactatgttgaatggtaaagcattcatgaaatggctgtaatatcttactaaatttacaatcattgcacattgttgagcactttatttatatagagatacccttcatccaccattcctaaaccttaccatacaaaacaaagttactccatattttcacctgggtaactggtaccaatgtctaaataaggtttagaatagatatagctttcattttactgctcctcaaatcaattcaaaagtttaacttaatcaatataaaatttacttatgaacacatataaagaacattttataggtgactatatnaattacgagcttcaaatcatcttcatagntctttgaaattattccattcanaattagaaatttgattgttacaca

SEQ ID NO: 37 - DNA, 593 bp, Homo sapiens
  misc_feature 593: n = A,T,C or G
aaatcacttctatcttctgtacttaagaactcaagtatagaaataaactgtgggctgaagtaacattgtaacctgctcccaacatgactgcataggtgtctaaggttaagtgtgaagattactgtgaggactcaagttacttgactaatcaatcccatttgaatttcaatccaagcagcgtattttacacacacctgaaggaaatatcttcagtgtgttcatgtgtgtgtctatgtgcatgtatgtgtaggggataggtgtaattagggaagggctgaccgaacaacattgataagtacatgctagaagtctgctgttgttggtaacacagaaacatacacagtcttcatattcaaagtcttcacggggatgtcttctgtaatttcccgcgtttgggtctcattcagaaacagctttagcttcctgctccgaaggccaaacaccttggctgcttcatacagaagaccttggtgggtgagtccattctgcccaagtgggttttcaagcaggagagtgcccactgtccccattaaacactcttgtggctctgcattcaggagctgtaggttggaccttttaaagctgaagagtgn

SEQ ID NO: 38 - DNA, 649 bp, Homo sapiens
  misc_feature 617, 636: n = A,T,C or G
ccagtatcgttttggtacttttgtacctctatctgactccatgcccctgcaagtgtaaaaccaagagacagaaaaatatgctacaccaaagcaatgcccattcatcgattctcagtcctggccctgctagtgatgcctccgctgatgaacggaaggcaggtgcaggtaaaagagtggtgtttttggaacccctgaaggatgctgcagcagggcagaacgggaaagtcaggctctttcccagcgaggcagtgatagctgagggcatcctaaagtccacgagggggaaatctgactcagattcagtcaattcagtgttttctgacacaccttttgtggcgtccacttaatttgtgcctatatttgtatgatgtcataatttaatctgttcatatttaactttgtgtgtggtctgcaaaataaacagcaggacagaaattgtgttgttttgttctttgaaatacaaccaaattctcttaaaatgattggtaggaaatgaggtaaagtacttcagttcctcaatgagccagagaaagatggggttgttttccaaagtttaagttctagatcacaatatcttagcttttagcactattggtaatttcagagtaggcccaaangtgatatgactcccattgncccctttatttta

SEQ ID NO: 39 - DNA, 312 bp, Homo sapiens
ctgaagaaaaagcagtcatcgattttaagtccaatgggcacatttatgacaatcggatagttctgaatggcatcgacctcaaagcatttcttgatagtctaccagatgtgaaaattgtcaagatgaagtgtcctgatggaggagacaatgcagatagcagtaacacagctcttaatatgcctgttattcctatgaatactattgcagaagcagttattgaaatgattaaccgaggacagattcaaataacaattaatggattcagtattagcaatggactggcaactactcagatcaacaataaggctgcaa

SEQ ID NO: 40 - DNA, 386 bp, Homo sapiens
  misc_feature 34, 40: n = A,T,C or G
aaaaagaacattatatccagatataaacttaacngatgangtattacaaaatatgaacatagatagttttgtttcccattataattcccagcattttcaccctgtcctgttcatacgagtcaattctcttcttcaattcctgtcccatcagccgtctgctgaaaaacactgctttgtcttggctaaggctgcacaagttcagtctcgcactggctcagcctcccctttcagcaacaccatttccctaccagggtacaagctgtttcctggtgctctaggtggagtctgatttggcattcgttccccatccctagtgctctttaagctggtacctgaagtcacagaaacgcttttgcttgctaattatttacaccagcagtgcattt

SEQ ID NO: 41 - DNA, 191 bp, Homo sapiens
  misc_feature 95, 119, 126: n = A,T,C or G
ataaaggactgtgtggggaaagtaccaaataaatgaggtaaaaaggaagggtcatacaaagagggcactacaccagcttcttggcctcaaagaanctcttgaggtgacgcatctgccanatgccantgaggatgaggatgacagtctgagcaatggaccaccataggaccctctggttggtgctctcgctc

SEQ ID NO: 42 - DNA, 325 bp, Homo sapiens
aaatttgaccaaaaaaaatttattgtacaattacccaccactggatttgactcagagaggacccccagagggtgtctccatcttccctatttattttcagcccttgagggcttcattgtagatcaaagccaaggcccccaggaaggtgacatactcctggaagttcacctcctggtccttgttccggtccaagtcttccatcagccttgcaatttcagcatcctgcagcttcgagccaatggtgagctccttctggatcagctccttcagctccttcttgctcagggtgtgcttgtcaccctccctgccggagtacttgtggaag

SEQ ID NO: 43 - DNA, 456 bp, Homo sapiens
  misc_feature 304, 306, 326, 329, 357, 370, 434, 436: n = A,T,C or G
aaaaagcctcttcctgatgatcccaactcagaattcactgtttaccaaacaccttggtcataataatgtcattagtttctccatttttattttctgaactgtacattcacaacttatgtttctttgagattaatagatattgggagaaaaacgcctttttaggaaaattatagtgaaaatttgacagttgattggcataatttcttgtttgaatgctgcctccattatataggtccttccaagaactcaaacactgtaagtgaaatatgggagtatagtttttattatttcttcttttcctttngntttcataatataatgcaggntgntcaggaaatcagcacaaagcctgatagnactttactaaaangactgcattctttggattccttcaagtctatggttcaagtcactaaagattcatttttgttgantncttattgagaaacaacaagt

SEQ ID NO: 44 - DNA, 301 bp, Homo sapiens
ccaagagctacaatgagcagcgcatcagacagaacgtgcaggtttttgagttccagttgactgcagaggacatgaaagccatagatggcctagacagaaatctccactattttaacagtgatagttttgctagccaccctaattatccatattcagatgaatattaacatggagagctttgcctgatgtctaccagaagccctgtgtgtggatggtgacgcagaggacgtctctatgccggtgactggacatatcacctctacttaaatccgtcctgtttagcgacttcagtcaactacag

SEQ ID NO: 45 - DNA, 706 bp, Homo sapiens
  misc_feature 34, 35, 39: n = A,T,C or G
aaaaaataaatgattatgatgtaattattacttnncagngtgttttgcaataacttcaacctgttaagagatacaaagaactatattaaactgggaactacaataacgtacacagaaccctcttcaaagaaattaaatatattagatgttaaaatgtggtagaaagatgcagctttcccaaagtagtaaagtactgcacatatgggttttgtggcagtccttggaaatatcctaggtagaacttaatgtagaaataaaaaggctaccacatattttcaatccaagtcatttttacaagaaaaaaaaagtgacacaaaataatgcactttaagttggtagcatacacaaggttattttttagcctaacatagacaggccaaatcattgaaataaaaaaaatatagaaaaacataaaagcccattaacttctgaattttgggaaagaaacaagaaagagcccaaagttttcagataggcacacataatttagattagaaatgaaaatgggctttaagccctataaatattgttttccaagaaaataagttttgaaagtgcaaaatgacaactcaaaaaggtcccctttccacctcatgcaggcaaaggacatttaaaagcacatccaactaaatcaaaaaaggggaggattaggaaatcacactagttcatccttcattatcagggctgggcttcaaacccttgaatg

SEQ ID NO: 46 - DNA, 227 bp, Homo sapiens
atttatttctattaaaatatagaagttattgcaaaaccctaactgtaaaaacgcaccaatataatcggactttgcatacagtagctaagagaatccaaacatttcagtgagacagtgaatttgcctggtagaacgctgacaaattcccatccacttgccctcttgaaaataaaaacaaaattcaaaacaaatcatacagctagaattttgatatctgaaatattttt

SEQ ID NO: 47 - DNA, 342 bp, Homo sapiens
gtctccacgctgtgcggagagggctctagcccctcagtcggacttctccttctccttcatgtgcaagaagacgatgctgaagatgaagagccccagcatcatggagaaggcgctggcgtagtaggggtaggccgaggggatgaagcgctcatactgcgtgtgctggagtggccgcacggatacctgagtggaagagtacaggtgtgtgtagcctagccggttgtaatccactttaaactggaatacaccatacacgtcgggcaacttgaactgaacactgtatttgccacctttcttcttcaggaaggtcctcacaaaaggatcaatgcggacaaactccag

SEQ ID NO: 48 - DNA, 203 bp, Homo sapiens
  misc_feature 17, 26, 38, 52, 98, 120, 125, 149, 160, 163, 182: n = A,T,C or G
ggataatattcatttanccttctganctttctgggcanacttggtgaccttnccagctccatcagccttcttgtccactgctttgatgacacccaccncaactgtctgtctcatatcacnaacancacctccgccgcaaccacactaanggcgaattctncanatatccatcacactggcgncccctccaccatgcatctaga

SEQ ID NO: 49 - DNA, 367 bp, Homo sapiens
  misc_feature 3, 9, 33, 36, 42: n = A,T,C or G
ttngccggnagtacttgagatccacagtcacgnganctttgncggtctctttacatctgcccacttcattttcattctttccttcccacacaatggtttttccaatgtgcaagaatgatttctcgacaaattcccggacactatggacctccccagtagctataacgaagtcctccggctcatcattctgcaacatcaaccacatagcctccacatagtccttggcatggccccaatctcgtttggcatccagatttcccaaactgaaacattccagttgtccaaggtaaatcttagctactgaccggctaatttttcgagtaacgaaattagctcctcttctgggactctcatgattgaagagaat

SEQ ID NO: 50 - DNA, 685 bp, Homo sapiens
  misc_feature 2: n = A,T,C or G
tnacacatttgtgagaactatttatgcaggaaatgctctatgtacagtgaagtgtgatgagaaagtgaaagtgttttctgtccgtggaacatcctttgatgctgcagcaacaagtggcggtagtgccagttcagaaaaggcatcaagtacttcaccagtggaaatatcagagtggcttgaccagaaattaacaaaaagtgatcgaccagagctaacaggtgccaaagtggtggtatctggtggtcgaggcttgaagagtggagagaactttaagttgttatatgacttggcagatcaactacatgctgcagttggtgcttcccgtgctgctgttgatgctggctttgttcccaatgacatgcaagttggacagacgggaaaaatagtagcaccagaactttatattgctgttggaatatctggagccatccaacatttagctgggatgaaagacagcaagacaattgtggcaattaataaagacccagaagctccaattttccaagtggcagattatggaatagttgcagatttatttaaggtagctcctgaaatgactgagatattgaagaaaaaatgaatcaggatcatgccttaaaaagaaaacttttgttaaaagtattccacttgaaatcacagatatttgtgggtattataaccaatcattggaaaagcatggagagct

SEQ ID NO: 51 - DNA, 315 bp, Homo sapiens
  misc_feature 1: n = A,T,C or G
ntttgtccggcaccctgcccacaggctgagctcagccccaggccctttcaggcatctagacactcccatagcctgtcgggctggggcaaggagatcccaggtcacacatactccttggaagagttggacttagggtaagagcggggtgcacggtacccagccttgctctcattcccaggacaggaacaggagagcagtgcacctcccaggatgactagggcagaccctgcccagccaataaagatggcagggccaaactcatacttaatgttggtagggatcaaagggttataaaagtctgtgacaatctgatgg

SEQ ID NO: 52 - DNA, 358 bp, Homo sapiens
  misc_feature 35: n = A,T,C or G
tgcatccacagacttcaactacatgattacttctntgcccattcttctctttcttttctttcccgaataacctctttcagatacggttcaaggtagaaattttcctcttcatatttggtccactgctctttaggcaagatctgatgcttcaagttcaggtccagtgccctcttaatgcgaaacatcctgtcattataaaggttctcaggaagtcttcttatggcttcttttacatcttcatcctcgtatattgtatcatctcgcattaaccccagtttattgaatcctgcagcattgtaataccattttcgaataccatccagccacttgcctgatgctgaaacggcctgcttaccag

SEQ ID NO: 53 - DNA, 407 bp, Homo sapiens
  misc_feature 36, 41: n = A,T,C or G
ccaagagatcagcacaacctttgcaggctgacttgntaagnctgacagtgacaaacttgtgagcttactgcagtcagtcacagaggctgttctttttcacacaccccttcatgcccggctttccccatatccacatgcagagggcgagctcataaaactacagggaagcgtgaaatgatggctttggtagctgtttactgggtaaccccactgtgacactgtccttttcacgtgatgtggaaacctacttctgtcctccaaaccatgaaatgtgtcatctagactgcagagtacttgagtgctttgcctcccgatatgccagagcttgtggtccaaagcccattcctgtgtgtccgtcctgccatttagccacagaaggctgcggagtgaggcggcagctagcctgg

SEQ ID NO: 54 - DNA, 571 bp, Homo sapiens
  misc_feature 2, 37, 43: n = A,T,C or G
cnacaaacagacctaaaatcgctcattgcatactctncaatgnagccacatagccctcgtagtaacagccattctcatccaaaccccctgaagcttcaccggcgcagtcattctcataatcgcccacggacttacatcctcattactattctgcctagcaaactcaaactacgaacgcactcacagtcgcatcataatcctctctcaaggacttcaaactctgctcccactaatagctttttgatgacttctagcaagcctcgctaacctcgccttaccccccactattaacctactgggagaactctctgtgctagtaaccacgttctcctgatcaaatatcactctcctacttacaggactcaacatactagtcacagccctatactccctctacatatttaccacaacacaatggggctcactcacccaccacattaacaacataaaaccctcattcacacgagaaaacaccctcatgttcatacacctatcccccattctcctcctatccctcaaccccgacatcattaccgggttttcctctcaaaaaaaaaaaaaaaaaaaaaaa

SEQ ID NO: 55 - DNA, 473 bp, Homo sapiens
tcttagcggctgctgttggttgggggccgtcccgctcctaaggcaggaagatggtggccgcaaagaagacgaaaaagtcgctggagtcgatcaactctaggctccaactcgttatgaaaagtgggaagtacgtcctggggtacaagcagactctgaagatgatcagacaaggcaaagcgaaattggtcattctcgctaacaactgcccagctttgaggaaatctgaaatagagtactatactatgttggctaaaactggtgtccatcactacagtggcaataatattgaactgggcacagcatgcggaaaatactacagagtgtgcacactggctatcattgatccaggtgactctgacatcattagaagcatgccagaacagactggtgaaaagtaaaccttttcacctacaaaatttcacctgcaaaccttaaacctgcaaaattttcctttaataaaatttgcttgtttt

SEQ ID NO: 56 - DNA, 396 bp, Homo sapiens
  misc_feature 40: n = A,T,C or G
tgctggcagtaactggcaagaagacaacaagaccctagtnctggttccaatttaggtggtggtgatgacctcaaacttcgttaattaatagcacaacagatgtgtgctgcccatctttacatacacattgcttctagttggcagaaataattgattaaaagaccagaaactgtgataactggaggtactacggtctatttctcaaccttaggcagtaatagacatcacaaactgccatggttttgcactatgattataatacctgcatttctaattttttaagcatgtagccagtaataatttgaagttttttttctatgcaagcttaccttgttggcattattttagggagttgaaactatcaactgtaaagctccttttcttccactttaattt

SEQ ID NO: 57 - DNA, 500 bp, Homo sapiens
ctgccccccacccttcccttcgatgacaacgtttgcaggcttcagggggaccagggaacaaagctggggcctggcagccccactacgctgccagccggggagaacaagtcacaattacaaattatcacaacaattagcgcctgtacttgggggatctgcaaattgaggaggccccagctcctcattgtacacgggtctatttggcagtgaccttgctctggagacgatgatattccttcagcctgagggaattgatgttgatgaacccggtggcatcagttggctcataatcaccctgcacgttcatgctcaccagctcctcattgtagagagacagtggggactcccggccgaggatgtacacctggcccttgaggacggacacccgcactttcccttccactcgctcctgggacttggcgatgcagtggcggacaaattcacactcagggctgtgccagaaaccggtatacaccagctcagcaaatttcaagcccagg

SEQ ID NO: 58 - DNA, 258 bp, Homo sapiens
  misc_feature 258: n = A,T,C or G
ctgcctcacaccgccccttgtgctcgcctcataggtgtctatttggactctaagctctacgggtgacagatcttgtttctgaagatggtttaagttatagcttcttaaacgaaagaataaaatactgcaaaatgtttttatatttggcccttccacccatttttaattgtgagagatttgtcaccaatcatcactggttcctccttaaaaattaaaaagtaacttctgtgtaaaaaaaaaaaaaaaaaaaaaaaaaan

SEQ ID NO: 59 - DNA, 529 bp, Homo sapiens
  misc_feature 6, 495: n = A,T,C or G
ctgtanacttgacctcaaagattccatcctcaatagtgaggattgacacatcaaaagtgccacctcccaggtcaaagatgagcacgtttctttctgctccaacctttttgtctaagccgtaagcaatagcagcagcagttggctcattaataattctaagtacattgagaccagcaatagttccagcatctttggtagcctgacgctgagagtcattaaagtaagctggcactgtgaccacagcattggtaacagtcttcccaaggtaggcttctgcaatttccttcatctttgtcagaaccatagaagacacctcctctggatagaagcttttggtctctcccttgtattctacttggaccttgggcctgccagcatcattcaccaccataaagggccaatgtttcatatcagactggacaacagcatcatcaaatctgcgtccaatcagacgtttggcatcaaaaactgtgttggtggggttcattgcaactngattctttgcggcatcacccgatcaaccgttcaa

SEQ ID NO: 60 - DNA, 422 bp, Homo sapiens
aaagtacaaaatcaaatacacagatccagcagatccagatatgtgaaccatatatacatatctatacaaccattatttagactttcacaaacctatctatacattctaatttatctatcaacactatcccttaagtaaaaagcaacatatctcttaagtaggtttgttatcagtaacactatcgaatgtaaattattttcacttcatcacttgaaacggtagaaataggtacctcctagaaactggagaattaccaagcatatatccaatttgtatagatttcttaaaatacattctataggaataattaaccgaagaaactgccaatcaaagtttttgggcatatttaacaaaacttgagtcatgggaagacataaagttaattaattgcattacaagagttttgttttgactttggtttt

SEQ ID NO: 61 - DNA, 486 bp, Homo sapiens
  misc_feature 378, 461, 463: n = A,T,C or G
cctacagacttatttcttcttggacacacccacggtgcggccacggcggccagtggtcttggtgtgctggcctcggacacgaaggccccagaagtgacgcagccctctatgggcccgaatcttcttcagtcgctccaggtcttcacggagcttgttgtccagaccattggctaggacctggctgtattttccatcctttacatccttctgtctgttcaagaaccagtctgggatcttgtactggcgtggattctgcataatggtgatcacacgttccacctcatcctcagtgagttctcccgccctcttggtgaggtcaatgtctgctttcctcaacaccacatgagcatatcttcggcccacacccttaatggcagngatggcaaaggctattttccgccgccatcgatgttggtgttgagtactcgcaaaatatgctggaacttttcagggatcactananacatggctgcagcacaagcggcg

SEQ ID NO: 62 - DNA, 228 bp, Homo sapiens
ctggagactctgggccaggagaagctgaagctggaggcggagcttggcaacatgcaggggctggtggaggacttcaagaacaagtatgaggatgagatcaataagcgtacagagatggagaacgaatttgtcctcatcaagaaggatgtggatgaagcttacatgaacaaggtagagctggagtctcgcctggaagggctgaccgacgagatcaacttcctcaggcag

SEQ ID NO: 63 - DNA, 475 bp, Homo sapiens
ccagctccttgcaggttgccccagtcacagagcctccataaatgatacgggtgctctgagccaccgcatcagagacgttggacttcagccatcctcggagcttctcgtgtacttcctgggcctgttggggtgttgcagtcttgccagtaccaatggcccacacaggctcataggccaggacgaccttgctccagtccttcacgttatctgcgatgacctttgtctgctcgaaaacaaccttctcagtgatgccagcttccctttcatctagcttctccccaatgcaggcgattactccgagtccctctgccagagcatgggccactttctgcccaatcagctcatctgactccccaaagacatgccttctctctgagtgccccaggaccacccacgtggctccgcagtctttgatcatgccagggctgatctccccagtaaaagccccattagtcactttgtagcagttctgcgc

SEQ ID NO: 64 - DNA, 448 bp, Homo sapiens
ccaacggtggccgccgccttattgctgactgccacccaggactgctggatcctctggtaccactggatgaggggccgggacatactgactgcccctttgaccccacaagaatctatgatacagccttggctctctggatcccttctttgctcatgtctgcaggggaggctgctctatctggttactgctgtgtggctgcactcactctacgtggagttgggccctgcaggaaggacggacttcaggggcagctagaggaaatgacagagcttgaatctcctaaatgtaaagggcaggaaaatgagcagctactggatcaaaatcaagaaatccgggcatcacagagaagttgggtttaggacagcaggtgctgttccgagactcagtcctaaagggttttttttcccactaagcaaggggccctgacctcgggatgagataacaaatt

SEQ ID NO: 65 - DNA, 329 bp, Homo sapiens
aaaaatctcaaatgaaaaagtcttcgatacaatattgttaagctgtattataagtattgttacacagggttatgcaattcccggcctggagcatttttgaaattcaaattgtctgtcctgtggagcaggcagtgattttgttccaaaactttgtatacacatttggagaaaagtactttatattttcagtgttttgtctgattttaatgtccgttcttagccaagctgctagcaggtgttaattggatccctttccttcactgaaatggaagagtttataagcttacgttagtattgtaatatgtaaagtaagcccaacaaaaattttt

SEQ ID NO: 66 - DNA, 415 bp, Homo sapiens
aaacagattcttggactggtggttcatatccatcagctcgttcaactttagcacctgtctcgtccccagtggcttttccagaactactgccttcaccatgaagctccatgagctttcccaattcaaacttgggcttcttcagcatttttacttttctgacgaagacatcatggagaggataaatagattggcaagccttttctatgtcttttccaatgctgtctggaatcaatttattgaccacttctttcaagtcatttgtctgcacctctcgggtcatgatttccatcatcttcttccggatttggcggacctgttggtgctgagcataagaggtcttccgtatctgattgttgcgttttttagtaaaaccaacacagaacagacgaagcaagtaaccatcggtagtcttgac

SEQ ID NO: 67 - DNA, 316 bp, Homo sapiens
atacgccagcttggtacccgagctcggatccctagtaacggccgccagtgtgctggaattcgcccttgccgcccgggcaggtcctgaaggaagagctggcctacctgaagaagaaccatgaggaggaaatcagtacgctgaggggccaagtgggaggccaggtcagtgtggaggtggattccgctccgggcaccgatctcgccaagatcctgagtgacatgcgaagccaatatgaggtcatggccgagcagaaccggaaggatgctgaagcctggttcaccagccggactgaagaattgaaccgggaggtcgctgg

SEQ ID NO: 68 - DNA, 507 bp, Homo sapiens
ttctgctccatgacagatttcacctggtccttcaacagaggaagggtccccttctccagggcctcagccacaaactgctgctcttcagacagctctagcagggcatccaggaagtccagaatggcttttgcacgcgcttctaccaagaccccagcagcattaaaaaggctgcttaggagaggcttgtctgggtcctccatgtgtagctccccggaaatcaggacctcagatactctttgctctagatcctgccgaatatcctccttgccgaggcacttagcgagggagtttagcacatcttttctcttctcctctgtcaggtccttgaggacactctccatgtcctccaacttctccttcatgtttctggaatcctccgaacccaaagactttcctgtagaggcagcaattgagaacctgggccacccagcccaaaaggttttatttctaaggctctgttatttgtctgactgtcttctggagaccacctctttgtatcttcccttc

SEQ ID NO: 69 - DNA, 626 bp, Homo sapiens
aaatgcaaacaattcatttaccatttctttgttttagtgcatctgcattaaggctttgaattatttgacccaagattttacaatattaaaatctgactcaaaattttacaatgttaaaacaaataggtccacaaccatactacctactgtgtctcactgagtcagcatagagttaaagctcaacaccttaaggaaatggtagcagagacatttgctaatatctaagaagttacatatatagtttttaattaaaggatgtataataaaacaaatagcttagtggcaagaaattggtgctaataaacaaaaggtttttcaaaagaaattgtaacatctttggaaaactgtctggttctaagttcccacttcctttagttcccacggagttcatgcagatacatttcttaagacaatcttaaagtacactgtggatggaaatggaatgtacatccagaactagaggtgaaaactaagacctgggtgctgatagaaaaatcttcctgatttcagtcgtcacacatttgtgtcctggagtaaaggttctttggcctctcctggcgcttgtgtattatgaggatggctgtgactgccacagtgctttctccaactgctggaccttaagctta

SEQ ID NO: 70 - DNA, 494 bp, Homo sapiens
gttttaccctttctaaacactgtcctttttgaaagttttgaatatatccacattctattgaaaccttgaaactaaaaatttagactcttatcgtcatcttaagttcttcatgctactcttaacctcccaaaaagcagtatctaagtcacatacatgatgtcttgggcattttctgagccatggagaactctgaaaggaagaatcgctgcttttctcaagcaaatcggtttcttgatgtcttttggttctccttgcctgctcctgatgcttggaccccttttattgatcagagtgctctagaataatggatggtcttggatgatggataaatagggacagggacagttaaattgggagcctttcttacaaccttgatgggatttttccccccaagtttccttctccactgaaatgccacactaatgcttgttggattcatgaggtggacctgcccgggcggccaagggcgaattctgcagatatccatcacactg

SEQ ID NO: 71 - DNA, 294 bp, Homo sapiens
ctgcttcaagacctcagcttcatgggacttgcgtctttcttctgcagcttctaatttcttctgaatttcctccagggaaagatccttcttctttggaggggaaagggggaattctggaacagattcttttgaccgagggctgagaatcagctcaaaagcctggcctgaggcacgcttctccagttctttcacctggatatcagaagaagccatggtgaatagaagacaagcgacaggcagtgtattctgcacaatcaactgggataaggaaagtcctgctcagtccgagccgcc

SEQ ID NO: 72 - DNA, 329 bp, Homo sapiens
aaatttgaccaaaaaaaatttattgtacaattacccaccactggatttgactcagagaggacccccagagggtgtctccatcttccctatttattttcagcccttgagggcttcattgtagatcaaagccaaggcccccaggaaggtgacatactcctggaagttcacctcctggtccttgttccggtccaagtcttccatcagccttgcaatttcagcatcctgcagcttcgagccaatggtgagctccttctggatcagctccttcagctccttcttgctcagggtgtgcttgtcaccctccctgccggagtacttgtggaagatgg

SEQ ID NO: 73 - DNA, 527 bp, Homo sapiens
aaatatcacaagtaggtcttaagtgtcatctggcatcttctttctgtagccaggtaactcttagatcttattcatcagcctgctgaacagttcctttttcagagacatagataccatccaaaaatttcctgatatccttgtttttaactgttgtggcttgctgaatcaaagccgctgaatttgaaacaagctcaatgtcatttccttcaaggattaattcatctttctgggcttgagatactgaacaagcaacacctggtctcatccgaaccctgcggatgtatttttcacccaagaaatttcggatttcaacaagagacccattctcctggataacaacgttgatggggaagtgagcatacacagacctcatcttgtaacggaagcccagtgtaacacccttgatcatgttctgtacatgactacaaatagtccgaacggtagccagttcctttctgttaccccaccatttgtcaacccggagcctcttttttttctttccaagaaggctgagttctacattgatg

SEQ ID NO: 74 - DNA, 221 bp, Homo sapiens
aaaattttaattggctagctcttgcccttatatgactttaatgtctgtgagtcattcccagcttaaattaacaattgttagtattagtctcacacataagtgccatacattttatcctcatggatgtgatgcactgaaaagttagttgctctccttttttcttttttttgtcgtgcatattttatttctgtagtttctggttagctaccctaaagtgattt

SEQ ID NO: 75 - DNA, 312 bp, Homo sapiens
cgccagcttggtaccgagctcggatccctagtaacggccgccagtgtgctggaattcgcccttgccgcccgggcaggtcctgaaggaagagctggcctacctgaagaagaaccatgaggaggaaatcagtacgctgaggggccaagtgggaggccaggtcagtgtggaggtggattccgctccgggcaccgatctcgccaagatcctgagtgacatgcgaagccaatatgaggtcatggccgagcagaaccggaaggatgctgaagcctggttcaccagccggactgaagaattgaaccgggaggtcgctgg

SEQ ID NO: 76 - DNA, 334 bp, Homo sapiens
ctggcaagagacttcctgaggcacatcagctacgttggtcaatttagggcacggtctggttctgcagctttgaaaggtggattctttctattagcacactttacaagagggattgtaaaggattaactcagtcaccagaaacgaaacaccacttcagaaattcagagacctctgatcaacagaacagacatttgggctttaactgctaaagcagctacctacttggggaaaccatggcattctgctgcctggacagcaggaattaagagagatttcagagttactggcacgaggacaaagcctctcagctcgcttcaccttggcaaccttaaac

SEQ ID NO: 77 - DNA, 433 bp, Homo sapiens
aaaatccctcaaaaactgtttattatacaagtgagttttgagtcacgatgggcttatcggtaggatttctggtagcgagcgcgggcaccagggcctccaaactttttggactcgcagcgacgagggtcagctaccagcagggtccggtcatactggatgaggatgtctttgatctccttcttggaagcctcatccacatatttctggtaataggccaccagggctttggagatggactgacggatagcataaatctgggccacgtgaccaccaccctttacacggacacggatgtctacaccagcaaatcgctccttgccgagaagcagaactggctccagcagcttgtactgtagcgtgcgcggctcaatcatctccaggggccgcccgttcaccttgatgagaccattgccgcgtttgcagtgcgccacag

SEQ ID NO: 78 - DNA, 435 bp, Homo sapiens
aaaatcttgagggattgatctcgcctcatgacagcaagttcaatgtttttgccacctgactgaaccacttccaggagtgccttgatcaccagcttaatggtcagatcatctgtttcaatggcttcgtcagtatagttcttctccaggaactcgcgcactgacttggcaccccgacctatggcattggccttccaggcatggtatgtgcccgaggggtcagtctgatagagcctaggagtgccatcaaagtcgaaacccacgatgagggcagagatgccaaacggcctgcgcccattgctctgcgtataacgctgcttcagactggcgatgtagcgggtgatgtactccacagtgaccgggtcctccacagtcagccggtggctctggcactccacccgggccctgttgatgactatccttgcatcggcggtgagg

SEQ ID NO: 79 - DNA, 426 bp, Homo sapiens
  misc_feature 399: n = A,T,C or G
ctgtgccataagagcattaggtggttttagctcttatctggggtatgaaagcaatttagctcatctcacagaaacaaaagcaggtgctgaatcatgaaaacctcaattatttttagcatgcctcttaatttttctttcccctggtttcttgtcgtctgtgcttgattcttgaacaggtaaccacttgagaggatgccggcgatagatgggccatggaggaagtgtcagcaaacatgaaaaagcaaatccggccataactatatagacagtccacccgaactgttcagccacgtacccgtagataaatccaactattgcagaaaaaagaataattccctgaaacatctgttcagctagcttctggcccttgtaatccatctgcgtgggcagcgagctcanatgctccagcatggctggctgaggagg

SEQ ID NO: 80 - DNA, 38 bp, Homo sapiens
  misc_feature 18: n = A,T,C or G
tttgttgccccaaatggnttttttaccaagcctttttt

SEQ ID NO: 81 - DNA, 459 bp, Homo sapiens
ctgatatctcctggtgctatccccaaactgccactcttaactcttgaagtaaataaataatctttgctggcaggactatgccaaatctccttaagcactctctaatcagacatcaagtcgtcccatttcttagaccttttatacctgtttttctccttctgttattccatttagtttttcaattcatacaaaaccgtatccaggccatcacctatcattctatacgacaaatgtttcttctagcatccccataatatcaccccttaccacacgacctccctccagcttaatctctcccactctaggttcccacgccgcccctaatcccgcttgaagcagccctgagaaacatcgcccattatctctccataccaccccccaaaaattttcgctgccccaacacttcaacactattttgttttatttgtcttattaatataagaaggcaggaatgtcagg

SEQ ID NO: 82 - DNA, 204 bp, Homo sapiens
aaataccgttttttacaccgttctctcggtacttttttaagctaagtcagcattgtcttccagtgttaaaggcatccctcacctctgcattgaacttacgtatccatgccaaggaatggaatttccatcctgagccagttcagttaggtgtcaattgatactattttaattttttatgcaatctgatgagatgagctcagattt

SEQ ID NO: 83 - DNA, 411 bp, Homo sapiens
ccagacgtttggcacaaggatcttcatgtttaattgcctcgtgcatttctccttccgcaattatactaaatattttgggcagattggtattgtttgggccaagaacaattggatgattactttcaatcaggtcacacagataattgaaagtctgaacagcttcttctttatcttcatgtagtggaagccaagacaaccagtgtggaaggacctcttcaacgtttacacagtcaggcttgaacttcatgattttccctactgctgagatgcagttctctgtagcattgacattttctttggtcttagaatccgcagactgaataactcttaccagcaggggaagtgcttctgtacaaaaagggcgataattatctccaccgtactgtgccatgactcccaggccatatgcag

SEQ ID NO: 84 - DNA, 356 bp, Homo sapiens
ctgaaccagatcaaaaaccccattgagaaacatggggccaacatggtccccatcaaggattacgagaacaagaactccaaaatgtctaaaataaggacacacaattctgaagtagaagaggacgacatggacaaacaccagcagaaagcccggtttgccaagcagccggcgtatacgctggtagacagagaagagaagccccccaacggcacgccgacaaaacacccaaactggacaaacaaacaggacaacagagacttggaaagtgcccagagcttaaaccgaatggagtacatcgtatagcagaccgcgggcactgccgccgctaggtagagtctgagggcttgtagttcttt

SEQ ID NO: 85 - DNA, 395 bp, Homo sapiens
  misc_feature 319, 327: n = A,T,C or G
ccgccatcacaccctggactcctgcaggggaggacacacggaggtggacaactgcagatacacttactcggagtggcacagttttactcagccccgtcttggtgaagaatccattagaggacacactctgattaaaaattaaacaatgaaagaaagtgtatctgtgtaatcaagatgaaaatcacaagcatgcccaagactatgtcctgacatataactatgaaggaagaggatcggtggctgggtctgtaggttgttgcagtgaacgacaagaagaagatgggcttgaatttttggataatttggagcccaaatttangacactancagaagcatgcatgaagagatgagtgtgttctaataagtctctgaaagccagtggctttatgactttt

SEQ ID NO: 86 - DNA, 536 bp, Homo sapiens
ctgtaggaactactgtcccagagctgaggcaaggggatttctcaggtcatttggagaacaagtgctttagtagtagtttaaagtagtaactgctactgtatttagtggggtggaattcagaagaaatttgaagaccagatcatgggtggtctgcatgtgaatgaacaggaatgagccggacagcctggctgtcattgctttcttcctccccatttggacccttctctgcccttacatttttgtttctccatctaccaccatccaccagtctatttattaacttagcaagaggacaagtaaagggccctcttggcttgattttgcttctttctttctgtggaggatatactaagtgcgactttgccctatcctatttggaaatccctaacagaattgagttttctattaaggatccaaaaagaaaaacaaaatgctaatgaagccatcagtcaagggtcacatgccaataaacaataaattttccagaagaaatgaaatccaactagacaaataaagtagagcttatgaaatggttc

SEQ ID NO: 87 - DNA, 454 bp, Homo sapiens
ccaattgaaacaaacagttctgagaccgttcttccaccactgattaagagtggggtggcaggtattagggataatattcatttagccttctgagctttctgggcagacttggtgaccttgccagctccagcagccttcttgtccactgctttgatgacacccaccgcaactgtctgtctcatatcacgaacagcaaagcgacccaaaggtggatagtctgagaagctctcaacacacatgggcttgccaggaaccatatcaacaatggcagcatcaccagacttcaagaatttagggccatcttccagctttttaccagaacggcgatcaatcttttccttcagctcagcaaacttgcatgcaatgtgagccgtgtggcaatccaatacaggggcatagccggcgcttatttggcctggatggttcaggataatcacctgagcagtgaagccag

SEQ ID NO: 88 - DNA, 512 bp, Homo sapiens
  misc_feature 475: n = A,T,C or G
ccaacaccttccgtggctttactcagctccagactctgatactgccacaacatgtcaactgtcctggaggaattaatgcctggaatactatcacctcttatatagacaaccaaatctgtcaagggcaaaagaacctttgcaataacactggggacccagaaatgtgtcctgagaatggatcttgtgtacctgatggtccaggtcttttgcagtgtgtttgtgctgatggtttccatggatacaagtgtatgcgccagggctcgttctcactgcttatgttcttcgggattctgggagccaccactctatccgtctccattctgctttgggcgacccagcgccgaaaagccaagacttcatgaactacataggtcttaccattgacctaagatcaatctgaactatctcagcccagtcagggagctctgcttcctagaaaggcatctttcgccagtggattcgcctcaaggttgangccgccattggaagatgaaaaattgcactcccttggt

SEQ ID NO: 89 - DNA, 419 bp, Homo sapiens
  misc_feature 326: n = A,T,C or G
ccaaccttcctgtgcccagcctgcagacaggtggcctctggtggttccaggatctcacggtatccgatcccatctacatattaccactggcagtcactgctacaatgtgggctgttcttgagctaggtgctgagacaggtgtgcaaagttctgaccttcagtggatgagaaatgtcatcagaatgatgcccctgataaccttgcccataaccatgcatttccccacggcagtgtttatgtactggctctcctccaatttgttttccctggtccaagtatcctgtctccggattccagcagtacgcactgtacttaaaatcccccancgtgttgtacatgacctggacaaattacctccacgggaaggcttcctagagagcttcaaaaaaggctggaaaaatgctgaaatgacgcgtcag

SEQ ID NO: 90 - DNA, 364 bp, Homo sapiens
  misc_feature 152, 189, 190, 228, 275, 298, 325, 336: n = A,T,C or G
cctgggtgcgaagcatgttggcttggcccttcacggtcctggagggaggtgaggctggccttggaaggcgtgccctggagaggtcttgggtgaaaacttgaccttgaagaaaccaatcacaaaagcggcgttgggtcatgggctaggcttanaggtgaagcatcaacatggaaccatctcaggaagccnnatcgcctcttccgaggtcctcacttccgggagcctgtncttgcaagatgcaatcatcgttcctgctttttcattgtcattaaatnctgtacaaacccattgtcattanctccaagtgtaaatttgggtcaagganacagaataatnatgggaatctcggagttcgacaccatag

SEQ ID NO: 91 - DNA, 134 bp, Homo sapiens
ccttttactgcgtctatattcctctaacttccttaatgatcaatcaaaaaaagtaacaccctccctttttcctgacagttctttcagctttacagaactgtattataagtttctatgtataactttttaactgt

SEQ ID NO: 92 - DNA, 363 bp, Homo sapiens
  misc_feature 317: n = A,T,C or G
ccaccatggagaacaaggtgatctgcgccctggtcctggtgtccatgctggccctcggcaccctggccgaggcccagacagagacgtgtacagtggccccccgtgaaagacagaattgtggttttcctggtgtcacgccctcccagtgtgcaaataagggctgctgtttcgacgacaccgttcgtggggtcccctggtgcttctatcctaataccatcgacgtccctccagaagaggagtgtgaattttagacacttctgcagggatctgcctgcatcctgacgcggtgccgtccccagcacggtgattagtcccanagctcggctgccacctccaccggacacctcagacacgcttctgcag

SEQ ID NO: 93 - DNA, 97 bp, Homo sapiens
  misc_feature 88: n = A,T,C or G
cctgggtgattgaggatgcaatgagctgtgattgtgccaccacactccagcctgggcaatacagcaagactgtctcaaaaaaaaaaancccaaaaaa

SEQ ID NO: 94 - DNA, 497 bp, Homo sapiens
  misc_feature 244, 429: n = A,T,C or G
ccaaaagtttagcatattctgcagcctcttctttatttttcttggtacgctgcttcttcagagcaatacgccgccgtttgtgctgcaggacacgtggagtaacaagacgctgaatcttgggtgctttggtcctaggtttcttaccttctttatttaagggctttcttacaacatactggcggacatcatcttctttagagagattgaaaagtttgcggattctgctagctcttttggggcccangcggcgaggcactgtagtatcagtcagtccaggaatatccttctctcctttttttacaataaccaagttgagaacgctcagatttgcatccacaatgcaaccacgaactgattttctctttctttctccagttctccttggtctgtaacaggaatgccccttactcagtagcaggcggacacggncatgggtcaagacaccctgcttcatggggaaaccttgtttgtcgttcccaccactgattcggaccaca

SEQ ID NO: 95 - DNA, 459 bp, Homo sapiens
  misc_feature 357, 370: n = A,T,C or G
aaaagacaaaaacaaaacaaaaataccacagctcaagataaagagtcctatacagaaatcacaaaaaggacagaccatctaaggaaaaattaaaaagacgacacaaggacaggctgggcagcctgggtcagggctcctggctggtgacctgctttgagtaggtttcttgcaggtacttcttaaaagctgtggggtttttccagagctcggcagcatgtgtgttcaagggactatcaatgttgggttctcctagaaggctctggatggagagcagaatggtcctgacatcatacagggcagaccacttttccttcaggatgtccaggcatatgttaccctgggtgtccacgttggggngatagcagggcgngaggaacttcactgtgggcgcattgtaagggtagccactggggaactctagcgagagcttatacctcaggtcttcatatactgttccag

SEQ ID NO: 96 - DNA, 230 bp, Homo sapiens
ttcgaaagcatcttgagaggaacagaaaggataaggatgctaaattccgtctgattctaatagagagccggattcaccgtttggctcgatattataagaccgagcgagtcctccctcccaattggaaatatgaatcatctacagcctctgccctggtcgcataaatttgtctgtgtactcaagcaataaaatgattgtttaacgaaaaaaaaaaaaaaaaaaaaaaaaaa

SEQ ID NO: 97 - DNA, 535 bp, Homo sapiens
aaaattattctcttctaaccaatgaagtgtttgtcagtatgccccaaagcttgctcttttgtgctcccttttgaataactttctatccagaaaaagagattatttgggacttgagatttgcagtgataccaacttatagcaatgatgtactttaagggaactacccaactatgttgtgatagaagaaagagaaaccttcactttggcattttttttaatcactgtttatttttctgtttgcggcccaggaagcagtgggaggtggtggcagatatgctttgcatatggattgttatgtttttatttgggcaagtttaatcatggaaaactcaaaaagaaggggggaaatggtcagtttaagccaaaagaaactttctaaacaatgtataggtacacagcaaaattaaacaaatccaacaatttctgaagcttagtgtaattgagtggtggttgttattcaataaaattattcccaaaagtgtttctcctaagagtgcagttcccatgagtcacttcctgaacccattgaccaaag

SEQ ID NO: 98 - DNA, 255 bp, Homo sapiens
  misc_feature 252, 255: n = A,T,C or G
aaaataaaaaaaaatttgcacttattcctcacaaaatcttcacttttggaactatcccaattgaagctacacactgaatttattaatacagcattaagtttctttgtgtaaaaaaatctttgtacacagtaataaaaaaagataaggcaagatgcattaaacagaaaccttctggctcttttcctctgcgtttttacagagccactgatgactatctgcaacaaaagagttaagtttctgattttccgtatnaan

SEQ ID NO: 99 - DNA, 599 bp, Homo sapiens
  misc_feature 162, 183, 315, 318, 324, 326, 357, 522, 571, 599: n = A,T,C or G
aaataaaaagagatccaaatcaagatcctcactaccccctacccctcaactaaccccctttagggccacattttcttcttgctcctaagaaaaaaatttggaattttgaatattctcggttttctgtgcacacctggaattgggcaaatgtgttcagctcanccagcattttctgtagacatnatcaaaagcaggcacttggggattctgggctttgagtacaaaccacggatcttgtgtcagaaacacatgttgagactcctccattccttccagaattttcagagatgaggtagacccacctcaatcatcctnagnatcagntngctaaattgccaggctcaatgacaagctctnctgccatctccaagcccacttttcatagttccgctctgtctttggctgcagcactttaggcactattctaagtcctggagtatatcactcttgcttcagagctaaataaacattaatgaacacacttactcagaacaagtcactggatagctgcccattgcaagntacatactcatgagatgaaagagggaagccattaaaggtcttcagagtngacaatacctagtcaagatgtggacctn

SEQ ID NO: 100 - DNA, 190 bp, Homo sapiens
ccacctccaaaactgcagaaaatattacacgtagtgttgaacacaaaacataaactaagttttaagccacataggtgttctgaaagcatgctcaacaaccacagccactggaggatggtccactggaaaaatatgatttcaggaaccagaagtaaagatgattaccctagtctcaggtgatgtggccttt

SEQ ID NO: 101 - DNA, 356 bp, Homo sapiens
  misc_feature 5: n = A,T,C or G
ccagngtcatatttgggcttaaaatttcaagaagggcacttcaaatggctttgcatttgcatgtttcagcgctagagcgtaggaatagaccctggcgtccactgtgagatgttcttcagctaccagagcatcaagtctctgcagcaggtcattcttgggtaaagaaaatgacttcacaaactctccatcccctggctttggcttcggccttgcgttttcggcatcatctccgttaatggtgactgtcacgatgtgtatagtacagtttgacaagcctgggtccatacagaccgctggagaacattcggcaatgtcccctttgtagccagtttcttcttcaagctcccggagagcag

SEQ ID NO: 102 - DNA, 415 bp, Homo sapiens
cagagaagtggatggacatttcgccatccaggcagaactaagccaggcataaccacagccaagcagattaaccccaggcagaccgataaaaagacctccagataggcagacagacagatggaccaccaacctggacagacagccaaagcttcagagatacagtccacaggtggacaaagggatccccagccagagagagagagaccagccaacagcttgatagaccagtgcagccagagagaccaccaaacagagcccccaaaagacagacatctctgctagctggacagccaggtggaccccctaagttagattactagacagatataaacagatcccctgctgaacagatacacagagttctcagaccccacccccaccctcaggtgggctggctggctgacagaccttctgg

SEQ ID NO: 103 - DNA, 190 bp, Homo sapiens
aggaagagctggcctacctgaagaagaaccatgaggaggaaatcagtacgctgaggggccaagtgggaggccaggtcagtgtggaggtggattccgctccgggcaccgatctcgccaagatcctgagtgacatgcgaagccaatatgaggtcatggccgagcagaaccggaaggatgctgaaccttggtt

SEQ ID NO: 104 - DNA, 507 bp, Homo sapiens
  misc_feature 209: n = A,T,C or G
ccactgcacttcagcctgggcgacagatctagaccccattctaaaaaaaaacaaaaaccccaaacccacacccacgaaagggtaatgttggcaagaagttgggtgcagaggtctactggtgaacatctgtggggaaagggtctaaggctgggaagcgagacgccaggttccgatcctgttgtgtagttaatttctggtgtggtcttgantaaggtaccccacctttatctgtaaccatctagtcaggtgatctctttagccattccagtgcccgggctctattagagctagttctaaggcattcatacttcttgcttagggcgtttctgtctttgatccctcatccccaggtgctagtgtatgagttgttgggaaagggctttcgagggggtgggggccaatggaaggctctgttgggacggcaccaggcgaggtgttgagttggctcggctcaaggttcttcggggtgtgagctggcatgaggacctgttggaagtgggatccagg

SEQ ID NO: 105 - DNA, 553 bp, Homo sapiens
ccatgaaaggcagctcttgccgaatgcgccgttcaattactttggggtacacgaccaatccttcagaaatgttctgcagcgtattcaatatagtatctgcggtaagaaatgcctcggccaaacagatccgtcggttggcactatcatccagtgtgcgttcaaaccactggacagatgctgtctgtagcgggtccatgacaagggtcatcaggtggcgggcaagactgcagcaacgttctgaacgcatgggattccgcttatatggcatcgcacttgagccaatctgctgtttttcaaagggttcctccatctccttgaggtttgccaggaggcgtatgtcggtgcaaatcttgtgcactgatgcccccaagctagccagcacagacagtacttcaatatccacttttcgtgtatatgtctgccctgtgatgatgaaagctctcttaaatcctgccttttctgtcaccatcttgtcaagctgctctaccttatggtcatctccctcaaagagctgcaggaaactggcctgagtgccagtggtaccctttactcc

SEQ ID NO: 106 - DNA, 617 bp, Homo sapiens
  misc_feature 356, 585: n = A,T,C or G
cctttccctgcccagtctggtgcctgccccacgttgtaccggacactggattcctggacccccttctcctttcctttctttccttcaggtcacgcagccctgtactgtatccagcaccacagaaacctcagtgtttttcctctgctggtttggggcacaaggaagccttagggtatggggaaaggctgttattacctagagtttactcccaggccagggggctgccatcttcttcacagacatccctgaaaggaagcccctttggggcagggaggtgaggacttcatctcaacatcggctggtggttggtaggggagctttttcttttctttccttttttttgtttttgtttttgnttttgtttttggtaacatgttaggagttaatgttgcaaagagtagtttacatcttcactttctgaagacacttgaatttaggaccgatgtatctgtgacaagcatgccagaagtggcaggggccatcagggctaaccacttcacacctaccatcgtcccatggggatccaagacctgagataaagcaacagcctgcccagatccctctgttcatcctatcccttccaangttggtccatgccaacataacctctgggcatc

SEQ ID NO: 107 - DNA, 167 bp, Homo sapiens
ccacccacgtcaaacatgtggaagttgactttgtccacctggaacttggtctcaaagattccagaagtcaggacacggcagcgaagcaggtcctgatcgctcggcacatagtcagcctgcttgatcacgtcgatcttgtccaggaagtactgggcacagtcaatcag

SEQ ID NO: 108 - DNA, 280 bp, Homo sapiens
aaaaacatggctgggtggaacatttctgtaccctactggtttgaccagagccttagtaagtacgtgcctgaaactgaaaccatgtgcactttaatggaaggtaagctgaacttctttcttttcaaacctagatgtatcggcaagcagtgtaaacggaggacttggggaaaaaggaccacatagtccatcgaagaagagtccttggaacaagcaactggctattgaaaaggttattttgtaacatttgtctaactttttacttgtttaagctttgcctcag

SEQ ID NO: 109 - DNA, 516 bp, Homo sapiens
  misc_feature 19, 26, 33, 36, 41, 59, 62, 82, 89, 93, 107, 168, 171, 208,224, 237, 238, 257, 260, 372, 384, 428, 432, 502, 516: n = A,T,C or G
ttggccggctttaaaaagntgagaanccagatnctnaatanaagaaaccccaagccaanaangttgatgctggtggcaaggngaaaaanggtnacctcaaagctaanaagcccaagaaggggaagccccattgcagccgcaaccctgtccttgtcagaggaattggcnggngttcccgatctgccatgtattccagaaaggccatgtncaagaggaagtactcngccgctaaatccnnggttgaaaagaaaaagaanganaaggttctcgcaactgttacaaaaccatttggttggtgacaatcaacggcggtacccgggtggttaaacttcgcaaaatgcctagatattatcctactgaagatgtgcctcnaaagctgttganccacggcaaaaaacccttcagtcagcacgtgagaaaactgcganccancattacccccgggaccattctgatcatcctcactggacgccacaggggcaagagggtggttgtcctgaancatacctcagccgn

SEQ ID NO: 110 - DNA, 527 bp, Homo sapiens
gggcacaatgataaacatactggctgttgtggtgacaatgacccaattgatgtgtgtgaaattggaagcaaggtatgtgcaagaggtgaaataattggcgtgaaagttctaggcatattggctatgattgacgaaggggaaaccgactggaaagtcattgccattaatgtggatgatcctgatgcagccaattataatgatatcaatgatgtcaaacggctgaaacctggctacttagaagctactgtggactggtttagaaggtataaggttcctgatggaaaaccagaaaatgagtttgcgtttaatgcagaatttaaagataaggactttgccattgatattattaaaagcactcatgaccattggaaagcattagtgactaagaaaacgaatggaaaaggaatcagttgcatgaatacaactttgtctgagagccccttcaagtgtgatcctgatgctgccagagccattgtggatgctttaccaccaccctgtgaatctgcctgcacagtaccaacagacgt

SEQ ID NO: 111 - DNA, 580 bp, Homo sapiens
aaatactatcacataaagcatggtggagaaaagaaattttgcttcataattagaaaaactcacaataaaacttgccaagaaaaacaaaaacgaaaaagccatttgaaaataaatacagtccatgccaaagtagtataaaatgaagccagaagtcttcaaaaagaaaacattttcctttcaatattttctttttaatgattttctgaaattggtgagactgtcaaattcaggggttgctgagctgttctgatttggttcctttggtatctgttttttcaccactgttgtccttggatttatcttcttccttaacgtctgtttttttgtcctctgtttctttcttatcttcttcaattctagctttctttgctcctttcttatgatcagccacatttcttcgacctccttctccttcatcctcagaatctgagaattcttcatcacaagctatccgcttgtctgatgctcgaatagaaattctcttgtctggatcttctccatcttcatctccactgtcttcatgaacagcatcttctggaatagcttgcatctggacaccaggtgcatgaggtaacatgcg

SEQ ID NO: 112 - DNA, 283 bp, Homo sapiens
aaaagacatttcagcttctttactcagttctgcatatacagtgcatcagtctgttctctttgaccacaattggaatacatttcaagatggtaacagccccatgaagtaccgctttaattccttgctggtaatctaatagaatcagattaagaaaattaacacaattttaccatttgacatactcttcattgaatttagtttgtctaaaatagtctcacaggtaaaaaacataacaacaatgaccaccattgtctttgatacatttattttaattcttaagtgg

SEQ ID NO: 113 - DNA, 575 bp, Homo sapiens
ctggaagcctggaggagtcacctgaattttctggtcatccaactcttcttcctgtggcaccaaagccacaaaataaggagggatgttcctgcggggtgtgtatctgcacaatgctgcaacctccttctccagacacttgatgagcagagcactgaacagggttgagctcccaatcaccagcgactcctctgggtacacgaacagggagggcctcaggtaatggtgtttcttcagcagtaccaacggcttgaaacccatgagcatcaaacctggatcatcaaaccgttttagctcttctgtttcctctttctccagtataatctgacgactcccatagatctgagacctcttggtatcgctaggcagaagcaaaccgcctgtacttgtattaaaggtccgggtcttggttttcactggttcatttgtttcccgatagagctttattggaggaggcttgagagccttctggaccagattataaatgcccacagagatcactatatctttgttgagcttcagctttaacctgctgagtgctcgcttcctggtctccttggcgcgaaccttccgcaaca

SEQ ID NO: 114 - DNA, 314 bp, Homo sapiens
aaatccttgaggggtacagcatcactcggattctgtgtccaatggccttagcaggaagattgcttcggaatttggcacgaaccatgccactgtttccatgggcccgagttacttttccccagatgactctggttttgtttggtttgccgccaggagtgactgtgttgttctttgctttatatacataagcgcatctcttgcccaaatagaattctgtttcatctcgggcgtaaacaccttcaattttaagaagagctgtgtgctccctttggttccggagaccccgcttatagccagcaaaaatggccttggac

SEQ ID NO: 115 - DNA, 304 bp, Homo sapiens
ccttgtcctctcttaggtccagagctcaggtgaatgcagattttcccggccatctgtgctgaagtccctgtggggaggctcctggctggtttcctgtaggtagacagctacacgtcctgcccttcattggcttcttttcatgaagctcctgccatctacaaaacatgtctcccttcttgaatcacatctctgttattgaaactctagaagtcaaccgggcatggtggctatgcctataatcccagcattttgggatgccaaggcgggtggatcacctgaggtcaggagttcaagaccagcctgg

SEQ ID NO: 116 - DNA, 454 bp, Homo sapiens; identical to SEQ ID NO: 87

SEQ ID NO: 117 - DNA, 380 bp, Homo sapiens
ctgtcctgcagcaaacactccaccctccaccttccattttcccccactactgcagcacctccaggcctgggtcccctgcaacctcccatcaaaggatgacccctaaacacagaggagcggggcaggcaggggggcaaggactggagctaccttgcttgttgggggactgggtacagttggcaagctgtgtttccatcagctccctgtcctcctttcttccctcgttattgatctatagacattaggaagggagtgagacggctcctccaccatcctcagccagtgcaacccattccctctgcttctctctctctctctctctctccctccctctccttccctaccctctcaccatctttcttggcctctctgagggtctc

SEQ ID NO: 118 - DNA, 651 bp, Homo sapiens
  misc_feature 492, 573, 639: n = A,T,C or G
gcgagaatgaagactattctcagcaatcagactgtcgacattccagaaaatgtcgacattactctgaagggacgcacagttatcgtgaagggccccagaggaaccctgcggagggacttcaatcacatcaatgtagaactcagccttcttggaaagaaaaaaaagaggctccgggttgacaaatggtggggtaacagaaaggaactggctaccgttcggactatttgtagtcatgtacagaacatgatcaagggtgttacactgggcttccgttacaagatgaggtctgtgtatgctcacttccccatcaacgttgttatccaggagaatgggtctcttgttgaaatccgaaatttcttgggtgaaaaatacatccgcagggttcggatgagaccaggtgttgcttgttcagtatctcaagcccagaaagatgaattaatccttgaaggaaatgacattgagcttgtttcaaattcagcggctttgattcancaagccacaacagttaaaaacaaggatatcaggaaatttttggatggtatctatgtctctgaaaaaggaactgttcagcangctgatgaataagatctaagagttcctggctacagaaagaagatgccagatgacacttaagacctncttgtgatattt

SEQ ID NO: 119 - DNA, 472 bp, Homo sapiens
  misc_feature 466, 467: n = A,T,C or G
ctggagcctgagtccgctgcacggagactctggtgtgggtcttgacgaggtggtcagtgaactcctgatagggagacttggtgaatacagtctccttccagaggtcgggggtcaggtagctgtaggtcttagaaatggcccagttcggtgttggtttttattctgcttatttggttgctgagaaagtaactgtgatcaccaaacataacgatgatgagcagtacgcttgggagtcctcagcagggggatcattcacagtgaggacagacacaggtgaacctatgggtcgtggaacaaaagttatcctacacctgaaagaagaccaaactgagtacttggaggaacgaagaataaaggagattgtgaagaaacattctcagtttattggatatcccattactctttttgtggagaaggaacgtgataaagaagtaagcgatgatgaggctgaagaaaaggaagaccnngaaga

SEQ ID NO: 120 - DNA, 544 bp, Homo sapiens
  misc_feature 544: n = A,T,C or G
cgagggcctgctgcttcctggttaagtatcttttgagattctagaacacatgggagctttttattttcggggaaaaaccgtatttttttcttgtccaattatttctaaagacacactacatagaaagaggccctataaactcaaaaagtcattgggaaacttaaagtctattctactttgcaagaggagaaatgtgttttatgaacgatagatcacatcagaactcctgtggggaggaaaccttataaattaaacacatggcccccttagagaccacaggcgatgtctgtctccatccttccctctccttttctgtcacctttccccctagctggctcctttggacctacccctgtccttgctgacttgtgttgcattgtattccaaacgtgtttacaggttctcttaagcaatgttgtatttgcaggcttttctgaataccaaatctgctttttgtaaagcgtaaaaacatcacaaagtaggtcattccatcaccacccttgtctctctacacattttgcctttggggatctggttggggttn

SEQ ID NO: 121 - DNA, 579 bp, Homo sapiens
  misc_feature 505: n = A,T,C or G
ctgatgctgtttgatgactctgggaagtattgaaggttccaaaatcagcactggaggatttggggaagttatcaaaatgagcaaaattagcatttactgatgcagcacttccacctgtagtttggggctgaaaaggagagtgacttgctgtggggaaacctccaaaattactcgaaccactagactgtccaaatgcatcaaagtttgcaaaatctgcatttgcagaattctgagctgcatgactgttgaaatgtgcaaagttagcaaaattggctgtagctgttgactgaggagctggagcagcaaagatgtctgagccgagatcacttaaaaggtcaaattgcttcttctcctgctgctgcccttgagaacgacctacaactggggactgactaggtgtgcccttatttaagtgcagtgttggtgcagaatcccctaaaagagatttcagtggtttgacctcaggtgtgctgcttgtgctactggcagaggacccttgaaatanatgcatgaactgatgccacgactttggcttgttctggcgggacataccatcttttcttttcatacttttcttga

SEQ ID NO: 122 - DNA, 238 bp, Homo sapiens
ctgccacagagggcccccaccagggaaatgtctagtgtctagtggatccaggccacaggagagagtgccttgtggagcgctgggagcaggacctgaccaccaccaggaccccagaactgtggagtcagtggcagcatgcagcgcccccttgggaaagctttaggcaccagcctgcaacccattcgagcagccacgtaggctgcacccagcaaagccacaggcacggggctacctgagg

SEQ ID NO: 123 - DNA, 377 bp, Homo sapiens
attacgccaacttggtaccgagctcggatccctagtaacggccgccagtgtgctggaattcgcccttggccgcccgggcaggtctgggcggatagcaccgggcatattttggaatggatgaggtctggcaccctgagcagtccagcgaggacttggtcttagttgagcaatttggctaggaggatagtatgcagcacggttctgagtctgtgggatagctgccatgaagtaacctgaaggaggtgctggctggtaggggttgattacagggttgggaacagctcgtacacttgccattctctgcatatactggttagtgaggtgagcctggcgctcttctttgcgctgagctaaagctacatacaatggctttgtgg

SEQ ID NO: 124 - DNA, 461 bp, Homo sapiens
ccagggtggagtgcagtggtgtaatcaaagctcactgcaaccttaacctccctgggctcaggtgatcctcccatcttcagcctgtcaagtagctggaaccacaggcatgtgccaccacacccagctaatttttttttaatgttttagagagacagggtttcaccacattacctaggctagtctcagaactcctggactcaagtgatctgcccatctcggcctctttgtatgtagactgtaccatgttgaatatattatcaatattcaagaaactagctttaactaacttttgctggtcaattccactgtactggctccgaaaattatcctctgggtactccctactatgaaaatggaggtattcttcaaaagatattaagaaattctccctatcaagacttatttatctatccactgatggttgttacatattaaataagcttaactgcccagtttctatt

SEQ ID NO: 125 - DNA, 266 bp, Homo sapiens
ccttctcttttgggtccccaggtggtaaatgtctgtaaacccagctattgcaggggttttgaagtgaagagctttgttatatcctaggtcagcaccacgggctgcccttgttctgaactgggagcacttcccccagtggaggatacagactcaaaagctgttcttggtgtgccttgctaggtgccagggcagcccagggtggcatctttaatgagggcttggcaggagtctcccaggctgagagtggggagtggggagatgaggaa

SEQ ID NO: 126 - DNA, 322 bp, Homo sapiens
ccttttagaagctattaaatgagcaaacattatagataaaccaattttatatctgaagcagcttatagcaccaacacgttggcaggaccagcagaggggtggggtctttggaccaaggcatctgggaacaggaagggctctcagccatcatctaccttatccctgtaagtctattaaatgtaaataatacatactttacaacttctcttagtcggcccttggcagattaaatctttgcaaaattccatatgtgctattgaaaaatgaaataaaacctcagatgtctgaattcttatttcaaatacagttatataattatttt

SEQ ID NO: 127 - DNA, 372 bp, Homo sapiens
accaagttgactctgaggccctggtgggctgcctgcggggcaagagtaaagaggagattcttgcaattaacaagcctttcaagatgatccccggagtggtggatggggtcttcctgcccaggcacccccaggagctgctggcctctgccgactttcagcctgtccctagcattgttggtgtcaacaacaatgaattcggctggctcatccccaaggtcatgaggatctatgatacccagaaggaaatggacagagaggacctgccaagggcgaattctgcagatatccatcacactggcggccgctcgagcatgcatctagagggcccaattcgccctatagtgagtcgtattacaattcactggccgtcgt

SEQ ID NO: 128 - DNA, 575 bp, Homo sapiens
ccaccacacccaattccttgctggtatcatggcagccgccacgtgccaggattaccggctacatcatcaagtatgagaagcctgggtctcctcccagagaagtggtccctcggccccgccctggtgtcacagaggctactattactggcctggaaccgggaaccgaatatacaatttatgtcattgccctgaagaataatcagaagagcgagcccctgattggaaggaaaaagacagttcaaaagacccctttcgtcacccaccctgggtatgacactggaaatggtattcagcttcctggcacttctggtcagcaacccagtgttgggcaacaaatgatctttgaggaacatggttttaggcggaccacaccgcccacaacggccacccccataaggcataggccaagaccatacccgccgaatgtaggacaagaagctctctctcagacaaccatctcatgggccccattccaggacacttctgagtacatcatttcatgtcatcctgttggcactgatgaagaacccttacagttcagggttcctggaacttctaccagtgccactctgaca

SEQ ID NO: 129 - DNA, 261 bp, Homo sapiens
aaactgctctttttatctgcttgtgggaatgtcgtctctttcgtggaagattgggtggtctcatgttgaggctgttgcccagtcccattaactcccttgtccccccacagaaggaagagacattgcccagctaagcatcaggaagctgtgttaaaagcccttctatgggtttggttttgtgatgtttttccctaatgggaaaaacgttatagttgtttcttactgccctgtctgggaagcagggcaaacctccaggttttt

SEQ ID NO: 130 - DNA, 495 bp, Homo sapiens
ctggggtactttcagtttggactgatattcatcacacctcagataaaatgcagagtaatatatagttgcactttataaatggtggttaaatggaaatgttcaagccattttatagttgtgatgcacaatataatttaagtgcttctgtcaaagtattcctccagtacaatttgtatagtttgctgcccttgatgagcaaaagtatttatcttgggcttatctaaatgatcaggatgagatttaatgcccatatcttaccagttcagtaatctccagagccatttcaccctttagagtgagtcacatgcagggagtgtgaatgtcagaggtggtttattatccagtctgccttacccttaatctgttcacagatatttatttactaatgctttttttttcttaagagttatgggataggaaaatgaagtgtttgctcttcatttactaaatgattgtaaacttgagtttttcatcaaaataaaattccattgtttt

SEQ ID NO: 131 - DNA, 214 bp, Homo sapiens
ccaagaggtcagagtcgtccctgaggctgagtcgaacacagacccgtggccctcataaaattaaacataaaagcacaaaaatggcgcaaccagacagcattggcttcagacaggcaggacacggggcccctcgtgtgacctgtgactttccacaaagggcaaggacctggcactgactccggccagtggagaaggctgtgccgcccacccggcc

SEQ ID NO: 132 - DNA, 476 bp, Homo sapiens
cctgggaggagactatggaagaaaggggccctcaagagggagtggccccactgccagaattcccaaaagatcattggccgtccacattcatgctggctggcgctggctgaactggtgccaccgtggcagttttgttttgttttgcttttttgcacccagaggcaaaatgggtggagcactatgcccaggggagcccttcccgaggagtcccaggggtgagcctctgtgcccctaatcatctcctaggaatggagggtagaccgagaaaggctggtatagggggaggtttcccaggtagaagaagaagtgtcagcagaccaggtgagcgtgggtgccagtggggttcttgggagcttcaaggaagcaaggaacgctccctccttcctctcctggtctttctctatgggacctagtaaataattactgcagccacctgaggctggaaaaccactccaggtgggggaggagagagttta

SEQ ID NO: 133 - DNA, 142 bp, Homo sapiens
  misc_feature 23, 73: n = A,T,C or G
aaaattaccttttcatcttgctngattttccttcagctaaattagaaatttgtagtttttcccctaaaaaatncaatggcattctttcttataaattacattctctgattttcttgtcagcctgcttcaaggaaatccatgt

SEQ ID NO: 134 - DNA, 456 bp, Homo sapiens
  misc_feature 1, 4, 18, 25, 69, 93, 98, 115, 134, 246, 352, 365, 369, 438,440: n = A,T,C or G
ngtncaagaaaataattntatctantgattattagtgacttgcaaacaatttactatttctagactaangaaataaattagtgtacaaattantgtancaggttaaaaacacctnagggatttcagaccaaaantgacctatatatatttttaattcatcatatatctgtcctgtttcttcatttttctcaatttccacacgctataaatttaggtcggccaataaagtactaaccgtataaaatnatgtttaatcctataatatcttaattcattttactaatattaaagatgacaaattattacctgtccaatacttatattagctagcaggctcaccagaataaagcanagtattttaattncatnaagacttgttgagtacagaatcaggaaaaagagaaatataattccttttccaaactcccttaaactaananctgcttttgatacttt

SEQ ID NO: 135 - DNA, 495 bp, Homo sapiens
  misc_feature 14, 47, 61, 179, 266, 311, 324, 352, 354, 416, 421, 458,477, 487: n = A,T,C or G
tttttttttgaaanaacatgtattgaggtaccttttattggtataanaacgtaagttccanattaaccatgtcattgtttcattttcaccatggattttttttcacaaactcctttgaaattaaacagacttatatgtaaatgtctttctacattaaaactacttcccaacccacaaanaccccacttactactaatttctggggaatttcgtttactcgttttatctaatattaaaaaatcaacattttgccagcagttaaaaanacaaccttaaagttctcaaattactttccaccaaacccggaaaanaaaaccacccatntccaaaactttaaagcaataaaaatttntnttttccaaaaaagtatttacagactgaaattcaaactctacattgccatcaatgtaattatncaagngcatacaaagccctggaaaagaggaagtatttcattncaaaatatttatgatcaanaaaatattgnttgccttt

SEQ ID NO: 136 - DNA, 384 bp, Homo sapiens
cctgagcccgacttagccagccctggctgttgtattaccaaagcagggtccatgtttgctgccttaaccctgtctcctctctgttactcagagggcctcatctcagacaaggcccagcctgctttttctcagccctgactttctaatgggctttcccccctaggtcagtcttgctggatttgtgcttttcttttgtggtttctctggccctgagaatagcatggggcttgtaaacctttgggctagatccctcctttcattgctgttgtctctgctcttccctctcctggctgtggttatttattattagtggtgtggcactgggagctgctcctaaggaagcagggagcaaatcccacctttaccccaccttcctgggaaagg

SEQ ID NO: 137 - DNA, 113 bp, Homo sapiens
ctgtgcagaaagggctctggagagatgttcatagcagcacacacctgcggctcttcttcggttctggaggctccagggcagccaatattgcttcgtcaaatacattctttagg

SEQ ID NO: 138 - DNA, 408 bp, Homo sapiens
aaagtacttttaagaaaaaaagcagggccttggaagttttggttcttttttcctcccctgttgcaaattctcatggtttgggttgggtggtggagagcgcgtgtcatctgcgggtggcactgcccacggtgggcgggcgggcctctctactcgaaggtgaccacgtttagattctgagacgggaagtggagggtgaataggtcacggcggcctttttttagtttaacttttccttttttgctgtctagtcatcctcgtcggtcttctgcttcttggtatcgacatcgtcatcctaagcagagaaagactgtcaaaggcccctccaaccccaggagccctatccagcccactgcctcagctcctgctggcagagcaagaaccagggacccccagctccacagcccaagg

SEQ ID NO: 139 - DNA, 28 bp, Homo sapiens
  misc_feature 14: n = A,T,C or G
tactgctggatatncctttaacgttgct

SEQ ID NO: 140 - DNA, 386 bp, Homo sapiens
ccaaccagccacgggagttggaattccctaactattgtcagagagagtgcaaagggatttgtctgattgaacaatctgcatttgaagatgacctggacctgcctgcatcccgcatggcagaggtggacatttggaaggtgcgtttgctcatgtttcctcttctctccccagaacctgctaaggctgcctcagacctgactgcctggttcagcctcttcgctgacctcgacccactctcaaatcctgatgctgttgggaaaaccgataaagaacacgaattgctcaatacatgaatctgtacccttcgggagggcactcacatgccgcccccagcagctcccctgggggctagcagaagtataaagtgatcagtatgctgttttaat

SEQ ID NO: 141 - DNA, 399 bp, Homo sapiens
ctggccctccatcaccaatgcggcagtccttgccgtgacatgctgagctctggaaggagcgaaggaggggctgcggtgttcagacaagagcctggacacagtgctgctgacagccaggggaggctctcagcgctgggaggggcgacagataaagcgagacagaccaaggagtaaatgccttgggatctgctctttgggaaggaagaggatgaaagtattaacagcagacgggtctctccaagtctgggtgcctacgcagggggcaggtgggaggggaagggagaggtaagagtggcttcgcttcacctcttgctgctggcaaaggcccaagtgctgtctaacaaggccagcaggttctccaagctgtatctagcccagagcattcatttacaggactct

SEQ ID NO: 142 - DNA, 248 bp, Homo sapiens
ctgcactcagaagaacctgtcgcttcacttgaaaactttctgttatacccaggatagccatatctccaatggtgccttccctcatatctgcaaagaaaaacaaatttactaaaaagcagttttaactaaagtatcaaaacatctctaatgatttataataaaaattaatcctattaataaaattaggacacccaactactttactcagtaggtagataagcctacaaatgagctcaaagaaagccttt

SEQ ID NO: 143 - DNA, 264 bp, Homo sapiens
ctgccttcttcttgacagcttctttagagtctttttgtacttgtacctgggccagcttccaacggttgctgatttcatagattttggttgatggatcgaacttcgctgcctgagagacgggagcacggtgtcccagtgagggcagaaacatcctaaatggattttcaaaggactccatgatgttctgggcttttttctgtgcaactgtcaatggaccctttttactgtcttcagcactaggttcattaaataacgtgatgacag

SEQ ID NO: 144 - DNA, 58 bp, Homo sapiens
  misc_feature 32, 44: n = A,T,C or G
tactagagtctcaatatcttgctggttaccancatttcctacangagaaatgaatgaa

SEQ ID NO: 145 - DNA, 569 bp, Homo sapiens
ccagagcttcatccagagctcactggaaggtggcttggcaggaagagggaatcttcctacagccctcctccaagggggacagaggctgggggcagagaaggaggcatttaagctttgctagcctcctgctgcctctgaggctgtaggacacgtcattcaaacctaccatcaaagtaggcttctgatttcaacttggatctcacggtagcccagtgacaccgcagcagccatgatgggatgtaggcaggagagcggtggcctggaaaccgcttctagacaatcctgtattatttagatctacatagagatacacgaaaaccctttataccaaataagagtaaataattataccaatataaacagggccgttgaccctttcattttattaaaatggcacataattattaaaacagcatactgatcactttatacttctgctagcccccaggggagctgctgggggcggcatgtgagtgccctcccgaagggtacagattcatgcattgagcaattcgtgttctttatcgattttcccaacagcatcaggatttgagagtgggtcgaggtca

SEQ ID NO: 146 - DNA, 546 bp, Homo sapiens
  misc_feature 395: n = A,T,C or G
ccacttccatgccctctccagaccaggagacacctgctgctgacctcgtggaaaacttagattttgacattctgatgcttcggaagtggtggctcctcctccctcacccctccgccacctgtgggcctcctctctgcatctcaagagaacaaccagatctttggactcctggggtgtgtgccatgcaatttagacgaagtgctttgaaaatatgccattcagtctctgactaggaaaataagtctgacctgataggtctgatgtcatcagctcttcaacatgagacaaaagaggggattttatgttttgagtcattagaatgatataataattttctgaattgacatctggatgttgaaattaggatggtgcaaaaggggtccagggcctcaggntgggcgcagcagccagctcccaatgacgcagaagctgcttcaaaaccccctcaacaaagaggggcacatgcaagtcaccaaagtgggaagccttcaccaaggccacacccaaagtctactgattgtctgtctaaagttcgttgattcctgg

SEQ ID NO: 147 - DNA, 653 bp, Homo sapiens
  misc_feature 45, 50, 72: n = A,T,C or G
atccctagtaacggccgccagtgtgctggaattcgcccttagcgngggcncgggcgaggtccttcattttanctaagtttagaatttatattacgcaactatgatttgagtggttattcattgagtaattttccactataaagaattttattgaacatttattaaaaaataatgtaatgcatggtcaaaaaatatgtaattcatggtctggacactgacgttgtttagggatttagtcatcaaggacagccctctgttgtttctaatgccgtactaatcaagactgtatggacacttgcatcttaagtactaaggaattactagtgattgttttattttatccatgtactcttttagtatttaataattaaatacctattcttagtgtttgacactccatatttcttttttttggaaatgaaacaaatatgcagtccaaaattcaggaactactagagtgaaatgatattaagtggaaaccagagataaatgctgttaatttaacaagtagattcttctccaaagaatgatgagtgattcttgggaagataaatgttaatgttcccaatagtcaagcttgtcttgcagtagtgaaaagcttagatgagtacggatacctcatttgaaactcagcctaggtaaggaagtgaaaa

SEQ ID NO: 148 - DNA, 219 bp, Homo sapiens
ccaacatggtgaaaccccatctctactaaaaatacaaaaaaaatattagccaggcatggtggtgcatgcctgtaatcccagctacttgggaggctgaggtaggagaattgcttgaacctggaaggcggaggttgtagtgagctgagattgtgccattgcactccaacctgggcaacaagagtgaaactccatctcaaaacaaaaacaaaactagacagc

SEQ ID NO: 149 - DNA, 547 bp, Homo sapiens
  misc_feature 304, 374: n = A,T,C or G
gctaggtaggggcaggtgggtgatctctaagctgcaaaaactgtgctgtccttgtgaggtcactgcctggacctggtgccctggctgccttcctgtgcccagaaaggaaggggctattgcctcctcccagccacgttccctttcctcctctccctcctgtggattctcccatcagccatctggttctcctcttaaggccagttgaagatggtcccttacagcttcccaagttaggttagtgatgtgaaatgctcctgtccctggccctacctccttccctgtccccacccctgcataaggcagntgttggttttcttccccaattcttttccaagtaggttttgtttaccctactccccaaatccctgagccanaagtggggtgcttatactcccaaaccttgagtgtccagccttcccctgttgtttttagtctcttgtgctgtgcctagtggcacctgggctggggaggacactgccccgtctaggtttttataaatgtcttactcaagttcaaacctccaccctgtgaatcaactgtgtctctt

SEQ ID NO: 150 - DNA, 281 bp, Homo sapiens
  misc_feature 279: n = A,T,C or G
ctgaaccctcgtggagccattcatacaggtccctagttaaggaacaagtgattatgctacctttgcacggttagggtaccgcggccgttaaacatgtgtcactgggcaggcggtgcctctaatactggtgatgctagaggtgatgtttttggtaaacaggcggggtaagatttgccgagttccttttactttttttaacctttccttatgagcatgcctgtgttgggttgacagtgagggtaataatgacttgttggttgattgtagatattgggctgnta

SEQ ID NO: 151 - DNA, 508 bp, Homo sapiens
  misc_feature 498: n = A,T,C or G
ccaggctggttttgatctcctgacctcaagcgatccactgtcctcggcctcccaaagtgttgagattacaggtgtgagccaccatgctcgctgagagcagatatttgaaatgtcactttgagttctgagaaaaagtaaaaagccagaagacatactagatatataaatatattactgcttaaaaagatttcctaaaaagaaatgtatcaagtgtatgaatcaaagtctgaaagaaagatgaagagccaccagacttctaggtaggtttacatccatcatgttcctcttgactgcctttgtttgtcgtttagttttttgctccactcaagcctgttagaatcaccatggaatacagctccagtgggaaggccactggagaagctgatgtgcactttgagacccatgaggatgctgttgcagcgatgctcaaggatcggtcccacgttcatcataggtatattgaactgttcctgaattcatgtccaaaaggaaaataanactctagggg

SEQ ID NO: 152 - DNA, 365 bp, Homo sapiens
  misc_feature 365: n = A,T,C or G
cctgcgcctcctgccttgccgcctgcaaagcaaagaaactgccttttattttttaaccttaaaaagtagccagatagtaacaagactggctggctgatgagcaaagcctttgctctcacgcagaggaaggcttggatgtacaatgaaactgcctggaactaaaagcagtgaagcaagggaggcaatcacactgaagcgggtcttcctccaggaacggggtcccacaggcgtgttgttttaaataacctgatgctgtgtgcatgatgctggtgcttgaccatgaaaggaaagtctcatccttaaaatgtgttgtacttcacaatcctggactgttgcttcaagtaaacaatatccacatttcgaan

SEQ ID NO: 153 - DNA, 203 bp, Homo sapiens
  misc_feature 196, 200, 201: n = A,T,C or G
aaaggaaaagttgattatgtatgtggggtgccaggaccactgccttgaaagcaagtgtgatttttatttttaatattattttatttgtgtctgtgtacatattcatgtataaattttatgaaacccaagcatagtgcttattttttaataaaacaactgacttaacaccaaaaaaaaaaaaaaaaaaaaaaaaagntttnncc

SEQ ID NO: 154 - DNA, 646 bp, Homo sapiens
aaaattttgacaatctgctgggtgctgagggaggtacacagggagcagatagcctctgcgtcctcctgggttttcttctttaattgcaggagctgggctgcttggatcagaggttccatggtctgaactgctccactctggtgaaggtttcttccccgaagccactcctcaagctgacttatattgtacctgagttgcatgcctgtgctccaagagcagacgtccttccgcaagagcaggttgttaagagtcactgcgttgatcatgtagaagagctgtttgaatacctgcaggatgatctcagggtccaagccctggtcacacatgactgtatgaaaggcattcatctggcggatgatagcttccaggcagtatgagttatccccatctgccatgctggaggagcgcttccggtagccggtgggcttcacaccagatagaccctgaatgctctcattttccaacatggcagaaactatcatcggctgtaacacgccctcggcaattttaatgagctgctggtagatctgaatggaaaggtcactcagcacctgacggacctgcccgggcggccaagggcgaattctgcagatatccatcacactggcggccgctcgagcatgcatctagagggcccaattcgccc

SEQ ID NO: 155 - DNA, 336 bp, Homo sapiens
ccatggtggcgcacgcctgtaatctcagctactcaggaggctgaggcaggagaatctcttgaacctgggaggaggaggttgcagtgagccaagatggtgccactgcactccagccttggcaacaagagtgagactctaccttaaaaaaaataaaaaaataaaaaaagtcaaaattagctgggtgtggtggtgcgcccgtagtctcggcttcttgggaggctgaggcaggagcattgtttgaacctgggaggcggaggttgcagtgagctgagactgcaccattgtagtccagcctgcatgacagagtgagactctgtctcaaaaaaaaaaaaaaaa

SEQ ID NO: 156 - DNA, 433 bp, Homo sapiens
ctgcctttgatcaagattcgggtgcaagtggagcaggagccatatacctggagggaatgtgctttgtcacaccaaagaggatttttttttcttcaaacttgtatgttgcctaggtttcaaattctttgccgcaaggctgatctgctttcattaactggaattctgtaggagatactggtgacctaagctaagttgcactcagcatactcagtgtcaagctaatgaggttctattataaaggttctacttttaatctgagggaaaacatgttcagggcttctagaacactaaaaaatttggcttaaaccagtgttcagtctggtgccaaacttcgaatggaatacaaattcacataatctgaactttgttcacaggttatcctaatagagtaattcttcactttgctctattgaactgtcttaaggatttgttt

SEQ ID NO: 157 - DNA, 418 bp, Homo sapiens
aaatcaataagtaatctaggactagcattatgtttgctagacctggcatttgctcggtacataaggttcaaagtttcctttcctttttttatttattttatattttgcaatgttttttttccataatatttaagtttttcgatgtttagatatttttcttcggtgaagcacaagtttcttttcatggtccctgatcaattttaaacagttggaacaccggtggcactgttaactgctttctgggcagcctctttagcttggtgggcttgtagtacagctacagcttcatcaaccttagaacggagtgactctggagactcgagcatatgaagaagttctgaattatcaatctccaacaacatgccagtgattttaccagcaagagtagggtgcatggcttgaataagaggaaacagcc

SEQ ID NO: 158 - DNA, 389 bp, Homo sapiens
aaatttattttttagtttttcttttttgtcaacaaatgattgatgaaataatgcaacacccttaaattccagaaaatggcatggtttttccaacctcctgtggatatggtgcatgatcaatctattatataggattaatacaagttcatgctttttgtgttatggtgaaacaacattaaagaatccaatttagattggttgaagcacaagtataataatccttgaatgtgatcaaacctatttaagacaccagtttgctttttctctgaaccagagaaatgaaagtcagtttaagaggctgatagatcttggccctgttaaggcatccacttcacagttctgaaggctgagtcagccccactccacagttaggccaagaattagatttt

SEQ ID NO: 159 - DNA, 155 bp, Homo sapiens
ctgagctgaccttactctgaggactaactcttttgctggaagcggtttctgatttacagctcttggtttctcccagacatgttggtgggagagatgttggtttttaaggggttgttagatggagtaaattttctttttttttttttttttttttt

SEQ ID NO: 160 - DNA, 555 bp, Homo sapiens
aaaagtcattcaagagtctcattatttttgtttttatttaaccctttcttcaatacaaaaagccaacaaaccaagactaagggggtgaccatgcaattccattttgtgtctgtgaacataggtgtgcttcccaaatacattaacaagctcttacttccccctaacccctatgaactcttgataacaccaagagtagcaccttcagaatatattgaataggcattaaatgcaaaaatatatatgtagccagacagtttatgagaatgaccctgtcaagcttcattattacgtggcaaaatccctctggcccacacagatctgtaattcactaggctcgtgtttgctacaaatagtgctaataaagttaaattgcacgtgcaatacggaacactgtcaatggactgcaccttgtgaaggaaaaacatgcttaagggggtgtaatgaaaatgatgtagacattttaagcattttctacacagcgagaaaacttcgtaagaacatgttacgtgtgcaacaggtaaacagaaatcctttcataaagcaccagcagtgttt

SEQ ID NO: 161 - DNA, 311 bp, Homo sapiens
cctagatggcaaaacacatgggctttgtgactccactactgacttccaggctaaggaaggactgacttagtgagctgttccaagaccactgagctcatggttccctgtggctgggacctccatcatgaccggggcttgaagagggtactctgttcccgctgccacatttggaacagtatgacggctgcagcagaggccaaaaactaagtgatcagccccagagagtcgatgggggacactgacaaaccaatcacaaagttggtgccattagctcttagggaggagaggtggggcctgggcaaggacagcag

SEQ ID NO: 162 - DNA, 320 bp, Homo sapiens
ctgtgatccagcaccgacccagccggcagtatgccacgcttgacgtctacaacccttttgagacccgggagccaccaccagcctatgagcctccagcccctgccccattgcctccaccctcagctccctccttgcagccctcgagaaagctcagccccacagaacctaagaactatggctcatacagcactcaggcctactatgggtgttaaattttttactctctctacaaggttttttcctagtgtccaaagagctgttcctctttggactaacagttaaatttacaaggggatttagagggttctgtgggcaaattt

SEQ ID NO: 163 - DNA, 643 bp, Homo sapiens
aaaacttctgggttctgctggtccagacagtctttcagaattagaataaaatctgtcttccctttgtggaggaagagttgaatcaggatatgattgccctggtggaggaaacatcatcctacggtcctgttccaccggagatgacagggacccagtgtcagaaggagccctgtgaggatcgattaacctgtcatagcttggttctcctctttcattggtaatctgatggtccaggggattccctgggctgcttgggcctcttcctcctccccctggaagcacaggtgagagtctgagtggatcctccaacaaagtttgaggagagggaaaagttctcgtttcagatgaaggccgacccaatggtgagggactacatggggaatgctctctgccaaatgctgtatttgaaacatcgagtgcattaggatctttttctaaaagttcaaatttcaactctgtttcagttaatttttgtttgttgtgagcattttctttccttaaatcactgaggtttctttcagcagtccgagctgccaaccaattatcatgtcctcttttctcgtaggaaataacctgcttttgataaaaatgaacagttctctccaattcttcttcaagatctttggctagctttctataggtc

SEQ ID NO: 164 - DNA, 636 bp, Homo sapiens
aagattatgatcgcctgaggcccctctcctacccagataccgatgttatactgatgtgtttttccatcgacagccctgatagtttagaaaacatcccagaaaagtggaccccagaagtcaagcatttctgtcccaacgtgcccatcatcctggttgggaataagaaggatcttcggaatgatgagcacacaaggcgggagctagccaagatgaagcaggagccggtgaaacctgaagaaggcagagatatggcaaacaggattggcgcttttgggtacatggagtgttcagcaaagaccaaagatggagtgagagaggtttttgaaatggctacgagagctgctctgcaagctagacgtgggaagaaaaaatctgggtgccttgtcttgtgaaaccttgctgcaagcacagcccttatgcggttaattttgaagtgctgtttattaatcttagtgtatgattactggcctttttcatttatctataatttacctaagattacaaatcagaagtcatcttgctaccagtatttagaagccaactatgattattaacgatgtccaacccgtctggcccaccagggtccttttgacactgctctaacagccctcctctgcactcccacctgacacacca

SEQ ID NO: 165 - DNA, 519 bp, Homo sapiens
ctgtagacttgacctcaaagattccatcctcaatagtgaggattgacacatcaaaagtgccacctcccaggtcaaagatgagcacgtttctttctgctccaacctttttgtctaagccgtaagcaatagcagcagcagttggctcattaataattctaagtacattgagaccagcaatagttccagcatctttggtagcctgacgctgagagtcattaaagtaagctggcactgtgaccacagcattggtaacagtcttcccaaggtaggcttctgcaatttccttcatctttgtcagaaccatagaagacacctcctctggatagaagcttttggtctctcccttgtattctacttggaccttgggcctgccagcatcattcaccaccataaagggccaatgtttcatatcagactggacaacagcatcatcaaatctgcgtccaatcagacgtttggcatcaaaaactgtgttggtggggttcattgcaacttgattctttgcggcatcacccgatc

SEQ ID NO: 166 - DNA, 266 bp, Homo sapiens
aaagtgaatgtgatgttggagagagtgggaaggaaaagtaatggcaagtatgcttgctcattaccaggcactgtgctaagctctgtgaatacacagataagtaaaatccacgctgtttctcaaagaactcacaatctgtttaagaagcagatgtctatacaataattttataactattattcaatgtgattagtactcacatagctctatatagagtgttatagaagaataaattagagaatatctcatttttcctccagtggttt

SEQ ID NO: 167 - DNA, 266 bp, Homo sapiens
aaaatctcttcttcctcaggagtcagcttggctcccttcttgcggcccaggggcagcgcatagtgggactcgtaccactgtcggtacggtgtgctgtcgatgagcacgatgcaattcttcaccagggtcttggtacgaaccagctcgttattagatgcattgtagacaacatcgatgatccttgttttacgagtacaacactctgagccccaggagaaattccccacgtccaacctcagggcacggtatttcttgttacctccccg

SEQ ID NO: 168 - DNA, 567 bp, Homo sapiens
  misc_feature 13, 515, 516, 517, 565: n = A,T,C or G
ctgacttcttttnaagttcccacattaggacattgatcagatgtgaatttttaattacaatcggcacttcttcaaacatgtactcaaaggtgatatttgcttttttcaatgcttcaggggaaaaatccttttctttacaaacttccatcagtttaggagtcagtctgtatgcctttagtgagagagatccttgggcagtttttatgggatcataaatgagaacgacagattcttcaatggcatgctggtaactaaactgagagtccaggagtgcccgggtaacgaatgagccatagtatgtggactgataccagcccacgtgaagatgatcaatgtttacatggcgaaggctccgcatcatttccatctgatattggacttcatcaaagtcagcatcatcctctgtgtgctgagggaaaggaaagcagttggtaatttcaagccgatcttctacaaccagacccaaaagcactccttgaacaacttcagttccttgtccttcttcttgataatgnnngattatctttaataccacaaggccatctatctgcacttgcttcacggntg

SEQ ID NO: 169 - DNA, 272 bp, Homo sapiens
ctgttgcatgccaagttttttgtgtgtgtgaaacacttcaaaactgatttaaaagatgtaaatttaaagagaatgcaattcaaatcatggagaatcttttctaaagaaaatttcaatctgcttttttgatctgggctcacttaaatagtgtgatcgatctatcccttagctgaacaaattatacaaagcagcatttagacttatattcactctcaagtatcaagaggttttcagccttttcttactaactgagagattcttttttggttttt

SEQ ID NO: 170 - DNA, 345 bp, Homo sapiens
ccaggcattctctccctgccctctctggcctctggggtcatactcacttctttagccagccccatcccctccaccccacacctgagttcttgcctcctccttttggggacacccaaaacactgcttgtgagaaggaagatggaaggtaagttctgtcgttctttccccaatccccaggaatggacaagaagccaacttagaaagaagggtctcacgtggctggcctggctcctccgtagacccctgttcttttcaacctctgcccacccgtgcatgtcatcacaaacatttgctcttaagttacaagagaccacatccacccagggattagggttcaagtagcag

SEQ ID NO: 171 - DNA, 156 bp, Homo sapiens
  misc_feature 152: n = A,T,C or G
aaacactgcttttagtatgatgtcaacaccagctatgcagaaagggctctggagagatgttcatagcagcacacacctgcggctcttcttcgatcctggaggctccagggcagccaatattgtatcgtcaaatacattcttttttttttttntttt

SEQ ID NO: 172 - DNA, 114 bp, Homo sapiens
caaaagccctgcatttaataagtgggagatgtggtcacagtggataaaaggagcacacataaaactttagagaggtgatttcactagagggagttttttttttttttttttttg

SEQ ID NO: 173 - DNA, 324 bp, Homo sapiens
aaaatcactttggtggtgattccaaattggtaccaagcaaactttctggatgcccaacatgattttcagtaaccaccctttagagtatttgtttactaagttcaccacattttgaacatggtagttttagactgcaataatatttagacttacattattacttactgctaagtaaaatctaaatcctgcaaatgcacagaattcaagctgaaatataatgatttatgtttagctcacattgaagtattggttggttacttatgtattaatgcagtgtgcattcacatttaatcaggtttagtctgtttctattttaataatttt

SEQ ID NO: 174 - DNA, 364 bp, Homo sapiens
  misc_feature 239, 262, 360, 361: n = A,T,C or G
cagacacacattctgttgacaagggaaaaccttcaaagcatgtttctttccctcaccacaacagaacatgcagtactaaagcaatatatttgtgattccccatgtaattcttcaatgttaaacagtgcagtcctctttcgaaagctaagatgaccatgcgccctttcctctgtacatatacccttaagaacgccccctccacacactgccccccagtatatgccgcattgtactgctgngttatatgctatgtacatgtcanaaaccattagcattgcatgcaggtttcatattctttctaagatggaaagtaataaaatatatttgaaatgcaaaaaaaaaaaaaaaaaaaaaaaaaannttt

SEQ ID NO: 175 - DNA, 532 bp, Homo sapiens
ccttcttatttagattccttttgatgtccttccattttcagatatacagttgcttttttcctctgggttttgggaagggcacctctcacatgacgatcttatggcctgcttctggggaaaaggatggggaaatgtcagagagtccttgcatatatcatctctcaaaactcttaatcttaaatattcagtatgtcaaggtgccatattttggggtagcatgtcctgagctccatcaacattaatgtaaaaatatttagcctaatgcctggcacatatcaagagcttaagaaatgctgactctaaaattatgacatctaggaagatgtggggcagaattgtaaacttacctgctaaattacctatgagctgcccaccattcgttaattatggcaataataatgggtttatcatgctgtatcctcactcttgcaagcagtgttccttgtgcttagcagtaaatgttgcctaatttggggcatgctggtgtgtctgcagactgttcttgtatgtggaaaggtaactggcctgcttg

SEQ ID NO: 176 - DNA, 524 bp, Homo sapiens
aaacctaaattttttaattaaatgcctgttcaacaaagctaattggaacaaacacatttatgtaaatttacattctagaatgccagggtaaacaaggagacgttattcaaagatgaataagaaagttctattctttttcatcatttgtgtgatcaggttgcaaaggacatgcttttctctttgcttttcctaagccactgcttcctgcctcttcaggaatctgattctctttttcagaatctttaggggacaacctaaagaattctccaattcctttttgccacttgggagttgggcgcacgcaaacggggttccctcctgcatatttattttcagctttcctcgatgaaactgatgtcgaattagtggcagaggtggaagaaccaagcacctttctgggggctcgagcagccaccacttttctgtaagtgcctggaacactgtctgctttagtccgcaccatgttcaaacaagaagagaggagaggagagaacgaactgacttcccagccgagggtgtttcac

SEQ ID NO: 177 - DNA, 357 bp, Homo sapiens
cgaagatatgcccatgtggtgttgaggaaagcagacattgacctcaccaagagggcgggagaactcactgaggatgaggtggaacgtgtgatcaccattatgcagaatccacgccagtacaagatcccagactggttcttgaacagacagaaggatgtaaaggatggaaaatacagccaggtcctagccaatggtctggacaacaagctccgtgaagacctggagcgactgaagaagattcgggcccatagagggctgcgtcacttctggggccttcgtgtccgaggccagcacaccaagaccactggccgccgtggccgcaccgtgggtgtgtccaagaagaaataagtctgtagg

SEQ ID NO: 178 - DNA, 420 bp, Homo sapiens
aaatgtcttgtttcccagatttcaggaaactttttttcttttaagctatccacagcttacagcaatttgataaaatatacttttgtgaacaaaaattgagacatttacattttctccctatgtggtcgctccagacttgggaaactattcatgaatatttatattgtatggtaatatagttattgcacaagttcaataaaaatctgctctttgtataacagaatacatttgaaaacattggttatattaccaagactttgactagaatgtcgtatttgaggatataaacccataggtaataaacccacaggtactacaaacaaagtctgaagtcagccttggtttggcttcctagtgtcaattaaacttctaaaagtttaatttgagattccttataaaaacttccagcaaagcaacttt

SEQ ID NO: 179 - DNA, 366 bp, Homo sapiens
cctaaaagcagccaccaattaagaaagcgttcaagctcaacacccactacctaaaaaatcccaaacatataactgaactcctcacacccaattggaccaatctatcaccctatagaagaactaatgttagtataagtaacatgaaaacattctcctccgcataagcctgcgtcagattaaaacactgaactgacaattaacagcccaatatctacaatcaaccaacaagtcattattaccctcactgtcaacccaacacaggcatgctcataaggaaaggttaaaaaaagtaaaaggaactcggcaaatcttaccccgcctgtttaccaaaaacatcacctctagcatcaccagtattagaggcac

SEQ ID NO: 180 - DNA, 187 bp, Homo sapiens
  misc_feature 37, 177, 181, 183, 187: n = A,T,C or G
ccagggtaaataggcagtcaacattttgattcataanagaacaaatgacgagaatatatcagtatcaatgtcagagagtgcaagacttagtgttctatacataaaacatatgaaacagacctataaagatggaatgtacaaaatctaaaaagaaaacaaagcaaaaaaaaaaccccnttcntnttcn

SEQ ID NO: 181 - DNA, 226 bp, Homo sapiens
ctgctagttgtgcttgctgggataaatcttcgatcttggcttccccaaaaactatgtaagtatctgaagcagggctcttgtagacatctggttttgtgatgacaaagaggatattcttagatttccggatagtgactctagtaactcctgtaacctgccgaagacccagtttggacatagccttccgtgccttcttttcactccgactctgttttgctttactgac

SEQ ID NO: 182 - DNA, 314 bp, Homo sapiens
  misc_feature 314: n = A,T,C or G
ctgtattgccgcagttctagcttcaccttcacgatgtttcccttggtcaaaagcgcactaaatcgtctccaagttcgaagcattcagcaaacaatggcaaggcagagccaccagaaacgtacacctgattttcatgacaaatacggtaatgctgtattagctagtggagccactttctgtattgttacatggacatatgtagcaacacaagtcggaatagaatggaacctgtcccctgttggcagagttaccccaaaggaatggaggaatcagtaatcatcccaggtacaagcttttttttttttttttttttn

SEQ ID NO: 183 - DNA, 146 bp, Homo sapiens
aaaaataaatagtaccacttttctaagactgtacagtttacaaataaggtttttttctttgttgttttcctcttctattaagttttagtgaaaagcctaattacagaaaattgtgcagatactagtgaagatactagtataagttt

SEQ ID NO: 184 - DNA, 361 bp, Homo sapiens
cctaagtcattaaaaaattctccctttgtaacctcagtgctggggactgaggcgagccccctcaggtcgctggagtgcaccagtcttggggaagaggtgcaggagaagctgtgttttttatctccacacgcagtatgaagataaaattacatagtattacctagacatagacagtattacctaggtagatgcactgctcacctgcacccttcccagctctcatttttgttaggtgatttgggatagggatagtgttttggggtatggggggagtgtttctgacctgctttgcagacgtgcctccgcacctcagcagtttggggtgtggccccagggcggttcttggatgtaaaagatgtgg

SEQ ID NO: 185 - DNA, 462 bp, Homo sapiens
aaaatactacatgacattctgtctattcaatcacctggtggtcatctttcttgtactaattaactgttgatgagcattttggatattctaggagaaagcctataatttcacatagtttctctttttcatgtaactgtaacctaaatgtattacttctgataaaactatatatcaaatgtcactgcaaattagttttatatctgtcatgtgagatttgtcttacttatttttcttttggttgccatggaagttatggccctgaaaatcgtctccctccccttctcttgctgtacagcatgcgttctctttttgtggttgctggctgggtactgtatttaatgaagtagagaatagcacttgcaaaaatacagtcttggtacctagagactgtcatgcagatagtataatttggtatatgtgctaatgcattgagtagaggattattttaacacactattttgc

SEQ ID NO: 186 - DNA, 178 bp, Homo sapiens
aaatgcattcttcacaagtaattcagcatatatttttatatcatgtttacttatgcttaagaattaaagcaagtatatttattactctgatggaaatgtgggaaatctctcattcatgcaatatacagggataatattcaagcgaagggaaaattcccgctttttatttttgtaaatg

SEQ ID NO: 187 - DNA, 269 bp, Homo sapiens
ctggaggccatcctcctggactaccaggggcggcaggagatcttcctgcagcgccatggacccctatctgtccacatggcctgcctctccttcttcttcctggctgcctgcagtgctgccaccgcagcccttctgaggcacaaagtcaaggccagactgaccaagaaagattcctgaggctggcaagtggggcaacgtgtggaggaagcccctcataatttggagaaaacttgatacaatagaagctgacttttaaggcattggctttt

SEQ ID NO: 188 - DNA, 564 bp, Homo sapiens
aaaatatttataaatatgccttaaagaaatacaaatgataacaattacataccgtatttacttgcttaatttcctctgtatttgtgtagatactttgacatggaatatatggtggggagacccgtagtgttaccgccccagtgggagggggccctggggaccctggtaatgctttagtcaaagggatatctctcttgtatcagaggctgtgtcttttagtaacaggagtcctcgtcagaattgcgtgtctgttgtctctaaaagaatgggtgaaccaatcggcctttgtgaatttattcagtgccttctctgtaccaagcactgggtaaggcacttttgtggagcattagacagtaaccctcaaggagctagagaaccggatgggagacatgagcggtaattaactcacttgttccccagagtttctatttgttttgattttctttttctgtgacttattttcctattttctttcctccatgtaattttcactatggcccaactaatataaacacctggaaattacaaggaaaaaaaattcttcctctaataactttccaaatc

SEQ ID NO: 189 - DNA, 365 bp, Homo sapiens
aaaaattcctagataaatttcattcattaattttctattttattctctatacccttctttgttttgtctgtcttcttttctttccacaaattcccaaggacaatccctaaaaaaactattagtcccagtgttcggttggagataaatttattccaacaatcctcaggtctgtggatgtctagagtgtaaatctggtgagtcagatgggctcctacagcacccagggcagcgtagtagggagcagtctgtccactgttcacacccactaggctcagtgcccccagcattgcaacactgaagccactgagccacggcttggtattttctccgaaccgcagagccgttgacttaagaccaatcaaaac

SEQ ID NO: 190 - DNA, 429 bp, Homo sapiens
ctggttttgccatgatgatctgatccactctaagtacagtgactgcagcattagtagcgagtttgatagcccaatattttcccaggtaagtatctagaataccagcttccagcatgtcctttacagcagggacttcagcctcaatatctaatccaacgtttttatttccttcttgatgtactgcataaagtttagagattacttcattggccttaactccagagttttctgccagtgcgcggggaatagcttcaaatgcctcagcaaacttcttaatagcatactgttcaagtccaggacatgtctctccatatgatgtgatctgtttggctaattcaatttctgttgctccacctccgggtacaagacgtttatcccttgtaagaactttgaaagtattaacaccatcgctactgccctttctatgtc

SEQ ID NO: 191 - DNA, 460 bp, Homo sapiens
aaaaagctacaatcacatcatgttgtaactacgtaaaaaacagagctgtaaatggaactgcttggctttgaccatacacatttctgcccagcccttacagaatctgcacaaagaaatatctccctttgctccagttaattgttcttgtatgtaagttgctttctattccagtatatccagagtggtgaaataacaaggccagccacgtagccaaaggtcgctccaagcgtacaggagatgggccatacctgaggagagaatgtatgagatcaaaaaagaacaaatgttttattattacttgagcacaagtgtaacctaagtatttctatattaaagcttaatgtgctttcttaaagaatgccaaaagtgtaataaggtcataactgcatttatcatgaacactaaaaatgtacacattttagttaatgtgcattaaactgtaacaagggcttctggcaat

SEQ ID NO: 192 - DNA, 291 bp, Homo sapiens
ccattgtgttgcctctgttactgtttgtattgaataaaaacatcttcatgtgggctggggtagaaactggtgtctgctctggtgtgatctgaaaaggcgtcttcactgctttatctcatgatgcttgcttgtaaaacttgattttagtttttcatttctcaaataggaatactacctttgaattcaataaaattcactgcaggataaaaaaaaaaaaaaaaaaaaaaaaaaaaaaaaaaaaaaaaaaaaaaaaaaaaaaaaaaaaaaaaaaaaaaaaaaaaaaaaaaaaaa

SEQ ID NO: 193 - DNA, 485 bp, Homo sapiens
ccaaagccatccattccaaggctgccaggaaatgaatgctgcccaacaacatctccattttgaaggtggtaatcattgaagaaatcgggacttatggctccttcagaggcaattaatccatctgagttgtagaaaaggtcaggtctttcgagaatatctccttcatgaatgtatggctcaattcgatcatcaccatacaagtactgctcactctcatccatctgacgactctctaccatctccagccactgagagttatgccagcgaaacttttcactctgaattttcttagcccattcttcatcatattccgctataatatctaatgtattatcacagacctttcggatttcattattcttatcatgcattaggtctatgagatatgctggagcctgtgtttccttgattatgacgtctcttgtggcttggtggaaaaccatctggtagaagacataaattatctgacacacaaattcatcatc

SEQ ID NO: 194 - DNA, 370 bp, Homo sapiens
  misc_feature 139, 163, 186, 190, 218, 302, 339: n = A,T,C or G
ctggtgcttgctgaaacccaggagctgaacagtgaggaggctgtccaccttgcttggctcactgggaccaggaaagcctgtctttggttaggctcgtgtacttctgcaggaaaaaaaaaaggatgtgtcattggtcatnatatttgaaaaggggaggaggccnaagttgttcccatttatccagtnttgnaaaatatttgacccccttggctgaattnttttgcaaaactactgtgtgtctgttcactaccttttcaggtttattgtttttatttttgcatgaattaaaacgttttaatttntttgcaaacaaggtctaaatgcggagtcaaaaatggnactgaatggggagggatcctttgtgttctca

SEQ ID NO: 195 - DNA, 429 bp, Homo sapiens
cctagagagctagagaagcaagtaagggccagggccagagtcggcttcaatggaacaacagcccagtgccctaaggcccctaactcttgctggctgtttcttgaccccaagccagggttgggagtcctctgggcatccattttttctaaaggaactggacagagtacacacaggaaaggaagctgtcaccctcttgccatctggctccaggggcctccagtccagcattcctccttcttcccttgattgggtggggccacatgatgggcagccaggctctgggctgtcccactagagcaggctgcaaacacagccatgtttcagtgaggcgttgatcttcttccctggtgtcccaacctaccagtgccacgttacagcccagagtgagttctacaagcgttgctggcctaatggatgggctgggggaag

SEQ ID NO: 196 - DNA, 282 bp, Homo sapiens
ctgggcccgcagtcggacctggtgagatcagaggagggggtgccaccagtctgtggacgaagatgagaagctggaatagagcagaaaacaggaggctgccactctccatctttcccaaagtcactccaggagcaagggtgtcatttactgaaatgacagactctccatttcacatttttcccccaagtgcagagtgcagggaagcagatgggctaaatttttagagtcagggttattaatgtatactttacatagtaaactttccccttttaagtgtgcagg

SEQ ID NO: 197 - DNA, 360 bp, Homo sapiens
gccaacatgccatccagactgaggaagacccgaaacttaggggccacgtgagccacggccacggccgcataggcaagcaccggaagcaccccggcggccgcggtaatgctggtggtctgcatcaccaccggatcaacttcgacaaataccacccaggctactttgggaaagttggtatgaagcattaccacttaaagaggaaccagagcttctgcccaactgtcaaccttgacaaattgtggactttggtcagtgaacagacacgggtgaatgctgctaaaaacaagacgggggctgctcccatcattgatgtggtgcgatcgggctactacaaagttctgggaaagggaaaagctccca

SEQ ID NO: 198 - DNA, 198 bp, Homo sapiens
ccagtatgtccccaggattatgtttgttgacccatctctgacagttagagccgatatcactggaagatattcaaatcgtctctatgcttacgaacctgcagatacagctctgttgcttgacaacatgaagaaagctctcaagttgctgaagactgaattgtaaagaaaaaaaatctccaagcccttctgtctgtcagg

SEQ ID NO: 199 - DNA, 412 bp, Homo sapiens
ggccacatgtagacagctaggtcagtgctttttcctcttagggtttctttgcagaaagaaacctccagcaagggaagagaggtgtgtgtccacaggaaggggctccgtggggatcccatgaagggatttgagctctttcagctccatgtcatttaacttttttgtttaaccaccttggctttctctccttttttgctgtcctccttacggaccagttaccagattcagaggctaatagttagttacttgttaatgctagtcacagccaggaggtcagaaggaattttctacttctggatccaaatgttacctcttaggggaagttatgccccctcaactattgtcttattataatgaatctttcctttttggtccttttaagtaaccactcaaaacttttcatttcactgaa

SEQ ID NO: 200 - DNA, 443 bp, Homo sapiens
ccaacaggtatataaaagggtgctcaacataattaatcatcaaggaaatgcatataaaaaccactcgaagtactatctctcaccagttaggctagctgttatcaaaaaaaacaaaagacaacaaatgttgtgatggtgtggaataaaaggaactctgtgcactgttggtgggaatgtagattggtacagccattatggaaaacagaatggaagtttctaaagaaaaataaaactaccatacgatccagcaatccctcttctgggcatatactcaaagtaaatgaaatcaccaccttgtaaatatatctgcagtccgtgttcattgcagcattattcatagtagccaacatggagacaactgaagtgtccgttgacagatgaataaagaaactgtgtatatatatgcctacacacaatggaatattattcatccctaaaaaaaa

SEQ ID NO: 201 - DNA, 439 bp, Homo sapiens
ccaaggtcagaggctgatgcaacaggccctcttctccccagggccaggctcctgtccagcctgggcactgcccagagtgatggcattggtccggatgctgttctgtctctgcttggacaccttcgcaaagatttctttcaggacagtctcaaaggctagctcaacattggtagagtccagggctgaggtctccgggaagagcagtccattgttttcagcgaacattcgggcctcctcagtgggcacttcccgggcctggctgaggtcacttttgttacccacgagcatgacgacgatcgtggcttcagcatggtcatagagctccttcagccatcgctccaccacagcataggtctggtgcttggttaggtcaaacaccaggagggcccccactgcaccacgatagtacccttgaagacaaagttataatcttcctcag

SEQ ID NO: 202 - DNA, 411 bp, Homo sapiens
aaatgcactgacatttttatttcttgcaacccgagttaaattcacgtttcatttcctacagaatgcaaaaaagacatccacaaggcaactccacttctaagttacaaattactagatgttagaaaactttctcgaaggacagtgcactattttttattttttgagacagagtcttgctctgtcgccttggctcactgcaagctccgcctcctgagttcacgccattcttctgcctcagtctcccgagtagctgggactacaggcgcccgccaccatgcccgactaattctttatatttttagtagagacggggcttcactgtgttagccaggatggtctcgatcttctgacctcgtgatccgcctgccccggccttccaaagtgctgagattacaggcgtgagccaccgtg

SEQ ID NO: 203 - DNA, 366 bp, Homo sapiens
cactgagccagcaggtgccagggagccactcgccccccatagcttctgcacacctcagactcaccccatcaccttggcagcaaagcactggctctgccgtctgacccctgatccaggcagccccctccgcagagaaaagggttggggagaagcctctgcagtcctggaagatgtggggtgctgggtgagaggcatcagcccccacaagtatgtttttgtgtcttaagatagcagtttactttgaaaaagtgaaaaaggcttccgggctgtcctctgcccagtgagatggaggacgctagagaaagtgctgagtgtcccgagagaggcccccgagccagtgcatggaggtccttcggcctggctcag

SEQ ID NO: 204 - DNA, 421 bp, Homo sapiens
  misc_feature 32, 339, 363: n = A,T,C or G
cctgtgccatctggttccacattcagggcctncactatgccatcctgtaccaccatggagaacctcttgagacgtcgattcccaaagatggacaccagcgaatcatctagtaataagtctgtctccttcccaaaggccccagtgggatcagccaggagccgaaccttgccttccgccttgtgggctcggccccactcgccagtcacaaaggcatcattaacactcagacaggccaccacctggactcccttggccttcagagcctcagcctgctccacaaaccctggcaggtgtgtcttggaacatccaggggtgaaggccccaggaactccaaacagnacacccttcttgcccttgaacagntctgccaggttcaccttgttccctggctccccttcaaacacctccactgctgggatgg

SEQ ID NO: 205 - DNA, 561 bp, Homo sapiens
aaatgccatgatccaggatggattttagatcttgttgaaagcagccacatccatggactgcacatagtcctcaaaagcagtgatctgctcctccagcatatctgttccaactttatcatcttcaactacacactgtatttgaagtttcttaattccgtatcccactggaactagtttagatgagccccagactaagccgtctgcttgaatgcttctgacgcactcctctaatttcgccatatctgtctcatcatcccaaggtttcacatctagtaagatggaagacttggcaacaagtgcaggttttttggctttctttgattcatattgtgcaagacgttcttcccttagcctctttgcttcttcactttcctcctcatcatcagatccaaagaggtcaatgtcatcatcatctttactatctgtagctccacttcctgtagtgtcttccacatcggcaggaccatatttgcccaaagctttcttcactcctggcaggctggccttttccttttcgtaagacttgatgtgattataccaacgtagggcatgacacaagtc

SEQ ID NO: 206 - DNA, 274 bp, Homo sapiens
ctgagaattcgtccgctcccgaggctgagcagggcggggctgagtaaatgccggcttaccatctctaccatcatccggtttagtcatccaacaagaagaaatatgaaattccagcaataagaaatgaacaaaagattggagctgaagacctaaagtgcttgctttttgcccgttgaccagataaatagaactatctgcattatctatgcagcatggggtttttattatttttacctaaagacgtctctttttggtaataacaaacgtgtttttt

SEQ ID NO: 207 - DNA, 554 bp, Homo sapiens
cctgggtgggcccttgtcccctgcaacacaggtcagcgccaacccccacctggtctgggcctgatcaagtggggagaggagcctttgcaggctgaattttcgcagcatggacccagaacttccaatactatgttgaataggagtggtgagagagggcatccttgtcttgtgccggtttccagcttttgccccttcagtatgatattggctatgggtttgtcataaatactcttattattttgagatatcttccatcagtacctagttgattgagagtttttagcatgaaggggtgttgaattttgtcaaagaccttttctgcatctattgagataatcatgtggtttttgtctttggttctgtttatatgctggattacatttattgatttgtgtatgttgaaccagccttgcatcccagggatgaagcccacttgatcatggtggataaagctttttgatgtgctgctggatttggtttgccagtattttattgaggatttttgcatcaatgttcatcagggatattgttctaaaattctctctttttgttgt

SEQ ID NO: 208 - DNA, 290 bp, Homo sapiens
ccatcattgagtatctagaggagacgcgtcccactccgcgacttctgcctcaggacccaaagaagagggccagcgtgcgtatgatttctgacctcatcgctggtggcatccagcccctgcagaacctgtctgtcctgaagcaagtgggagaggagatgcagccgagctccacgctgatctgaagatacaggagagggacgaactcgcctggaagaaactaaagcttgacggcttggacgaagatggggagaaggaagcgagactcatacgcaacctcaatgtcatcttgg

SEQ ID NO: 209 - DNA, 423 bp, Homo sapiens
cctgacattcctgccttcttatattaataagaaaaataaaacaaaatagtgttgaagtgttggggtggtgaaaatttttgaggggtggtagggagagagaatgggcgatgtttctcagggctgcttcaagtgggattaggggcagcgtgggaacctagagtgggagagattaagctgaagggaggtcttgtggtaaagggtgatattgtggggatgtaagaagaaacatttgtcatatagaatgattggtgatggcctggatacggttttggatgaattgagaaactaaatggaataacagaaggagaaaaacaggtataaaaggtctaagaattgggaggacctaggatatctgattagagagtgcctaaggagattcagcagagtcctgccagcaaagattatttatttacttcaagagtt

SEQ ID NO: 210 - DNA, 462 bp, Homo sapiens
  misc_feature 236: n = A,T,C or G
ctgcacatcaaggacatcttcgggaagttcaggattgccgtagctaaactgaaaaccaccatccatggactctccaaaccaaacgtgtttcttctcagcactagaatctgtccaccagtgtttccgtggaacattcaaaggattggcacttatgcatgtttccccagtttccatattacagaataccttgatagcatccaatttgcatccttggttagggtcaacccagtattctncactcttgagttcaggatggcagaatttcaggtctctgcagtttctagcggggtttttacgagaaccatcaggactaatgaggctttctatttgtccattaacagacttgagtgaagtcataatctcatcggtgttgattttgaaatccattggttcatctccataatacggggcaaaactgccagctttttcacctccaatcccagcaatggcagcggctccaac

SEQ ID NO: 211 - DNA, 589 bp, Homo sapiens
  misc_feature 540, 582: n = A,T,C or G
ccacaggggctcacctgggccccatggcttttcacctaagtgggtcctgccccctcccccatgaccttcaggagcaccccatattatttccaaaaatatcttggacagacaaggaccaaaatgccaaaatctcagcggactcgataatctgcctgctgatgttccttctgtggctgtgtctattttcagttctgctctaacacggcatgccctttctcagcccaggaaacagcatgtggttcagagaaaagagcgacaaggaaaagttaggactcctgaggtccgaacaggggcttctgttgcccacttcacaacacccagtgatcaccggtgtgcaattgcctccttggctctgagggatgttttgcgctcccttttctcatcattggggttagcgggtgcagacaaattcagcaatagtatgcagatcagcccctcaccacctcattgttctcatctggaactgaaactttctggatttctcttgaagtgctacactgcactgaatgtaaggaattgttgcttgtggaagtttctcancgtttctggctgtcttagggctggcctcagaacccagcattnctgttac

SEQ ID NO: 212 - DNA, 479 bp, Homo sapiens
ctggatacgattcagggtgaactaaatgcacctactcagttcaaggtaaccacttctaagaccataattctaaaatttgtttcaggtggatctgcagacaaaaagttatgtaatcttcaagcaggaattttgtatacttgtgtttcttatctccaattagaacttcctttctaaagtaaactcagtcatggttcttttggctagtattagtgtttcgaatataatgtacagagagagaaatagaaatttttaatagatggttttgaaaccatcctttcagaagaaaacattgtcttttacaagtcttcgtcggcagttgtaatttgactcagtcttaacttttagggccgactaaatgaattgatgtctcaaatcaggatgcagaatcattttggagcagtcagatctgaagaaaggtattacatagatgcagatctgttacgagaaatcaagcagcatttgaaacaacaacaggaagg

SEQ ID NO: 213 - DNA, 264 bp, Homo sapiens; identical to SEQ ID NO: 143

SEQ ID NO: 214 - DNA, 219 bp, Homo sapiens; identical to SEQ ID NO: 148

SEQ ID NO: 215 - DNA, 586 bp, Homo sapiens
ccacctcaagatgaaaacagataactccctaaatgttaactggctctactcccctaatattaaacataaaaaccacatgggaaatatagaaattcaaatagaagtaacataaacctgtcataaatcgtaaacaaaaaactatttgtgggacagcatggatgacaaatggtctactgtgtaaattttagaatgaggcagacaaaagttagaaggccggttaattttcccctccttctcctgcttcagcttcgtctccttgggtatccgatgtccacaatgtcaagttgtctctcagtaattgcattattagcgtgctgtctttgtatgactcttcacttaatgtatcaagttcagcaatggcttcatcaaaagctgtctttgcaagagagcaggctttctctggggagttcagaatctcataatagaacacagagaagttaagggccagacccagtctgataggatgtgttggttgcatttcctttttgctgatttcaaaagcttcttggtatgcttgttgtgactgatcgacaatccctttcttgtcatcaccagcggcaacctcagccaagtaacggtagtaatt

SEQ ID NO: 216 - DNA, 501 bp, Homo sapiens
aaattcttcattttaccagcaactgctgacatcaaagtctcccctcccccaacaacaaaaatacaattaaaaaaaataaataataaagtcatttgtgatcgttgctgtggttctgagctgcaaaggcactttcaaatacagaactacttgtacgtcatcataaaaccaatatacaaaaacaactcaagagtcaataaatataaataaaactatgatctaagactgcatcaccattaggacatctggcagaagtgggagctcaaagaccagggggctgggcaggctcctgggagcctgatccgagaccgtgtcggctgcaaggggacacacaaccagggtactgttgactagctttttgcatagctgtgagatgcggcactcgatttcccagccaaccacagaaactaccattgccagtgtaagccagcttgtcaaaacttaaattaacacagggattctaagtcagcaacggcctcagactcgagtatgacacgacagttt

SEQ ID NO: 217 - DNA, 62 bp, Homo sapiens
  misc_feature 43: n = A,T,C or G
aacctactagagtctcaatatctgctggttaccaccatttagntacaagagaaatgaatgaa

SEQ ID NO: 218 - DNA, 539 bp, Homo sapiens
aaatctttgtcattcacagacagttgttttgcttcttccttaaagcatttgcaacagctacagtccaaaattgcttctttaccaaggatatttacagaaaagactctgaccagagatcgagaccatcctagccaacatcgtgaaaccccatctctactaaaaatacaaaaatgagctgggcttggtggcgcgcacctgtagtcccagttactcgggaggctgaggcaggagaatcgcttgaacccgggaggtggagattgcagtgagcccagatcgcaccactgcactccagtctggcaacagagcaagactccatctcaaaaagaaaagaaaagaagactctgacctgtactcttgaatacaagtttctgataccactgcactgtctgagaatttccaaaactttaatgaactaactgacagcttcatgaaactgtccaccaagatcaagcagagaaaataattaatttcatgggactaaatgaactaatgaggataatattttcataattttttatttgaaattttgctgattcttt

SEQ ID NO: 219 - DNA, 253 bp, Homo sapiens
  misc_feature 157, 163: n = A,T,C or G
aaaatggtgccctaccattgacacatgcagaaattggtgcgttttgcttttttttttcctatgctgctctgttttgtcttaaaggtcttgagggttgaccatgttgcgtcatcatcaacattttgggggttgtgttggatgggatgatctgttgcanaggganaggcagggaaccctgctccttcgggccccaggttgatcctgtgactgaggctccccctcatgtagcctccccaggcccagggccctgagg

SEQ ID NO: 220 - DNA, 297 bp, Homo sapiens
ccagccggtatggccggctctgcttgatgtccacgctgttgatgactttgttgtgtcctgtaatctcgcccacagaagagccactatcccagaggaagactgctccaaacttctcccttccttccccgaccacggcgatcctcttactgtcttcagtccaagcaatgtctttgatcttcccagcgaaaggctggtactcatacttcaacaggtgctccttctgcgtggtatcccagatcctcagcttcccagacacatctccggaggcaatgtagaatccgctgggcgcatacttgg

SEQ ID NO: 221 - DNA, 580 bp, Homo sapiens
ccagagcttcatccagagctcactggaaggtggcttggcaggaagagggaatcttcctacagccctcctccaagggggacagaggctgggggcagagaaggaggcatttaagctttgctagcctcctgctgcctctgaggctgtaggacacgtcattcaaacctaccatcaaagtaggcttctgatttcaacttggatctcacggtagcccagtgacaccgcagcagccatgatgggatgtaggcaggagagcggtggcctggaaaccgcttctagacaatcctgtattatttagatctacatagagatacacgaaaaccctttataccaaataagagtaaataattataccaatataaacagggccgttgaccctttcattttattaaaatggcacataattattaaaacagcatactgatcactttatacttctgctagcccccaggggagctgctgggggcggcatgtgagtgccctcccgaagggtacagattcatgcattgagcaattcgtgttctttatcgattttcccaacagcatcaggatttgagagtgggtcgaggtcagcgaagaggct

SEQ ID NO: 222 - DNA, 548 bp, Homo sapiens
  misc_feature 303, 304, 374, 377, 451, 540, 542: n = A,T,C or G
gctaggtaggggcaggtgggtgatctctaagctgcaaaaactgtgctgtccttgtgaggtcactgcctggacctggtgccctggctgccttcctgtgcccagaaaggaaggggctattgcctcctcccagccacgttccctttcctcctctccctcctgtggattctcccatcagccatctggttctcctcttaaggccagttgaagatggtcccttacagcttcccaagttaggttagtgatgtgaaatgctcctgtccctggccctacctccttccctgtccccacccctgcataaggcanntgttggttttcttccccaattcttttccaagtaggttttgtttaccctactccccaaatccctgagccanaantggggtgcttatactcccaaaccttgagtgtccagccttcccctgttgtttttagtctcttgtgctgtgcctantggcacctgggctggggaggacactgccccgtctaggtttttataaatgtcttactcaagttcaaacctccaccctgtgaatcaactgngnctcttt

SEQ ID NO: 223 - DNA, 546 bp, Homo sapiens
ccacttccatgccctctccagaccaggagacacctgctgctgacctcgtggaaaacttagattttgacattctgatgcttcggaagtggtggctcctcctccctcacccctccgccacctgtgggcctcctctctgcatctcaagagaacaaccagatctttggactcctggggtgtgtgccatgcaatttagacgaagtgctttgaaaatatgccattcagtctctgactaggaaaataagtctgacctgataggtctgatgtcatcagctcttcaacatgagacaaaagaggggattttatgttttgagtcattagaatgatataataattttctgaattgacatctggatgttgaaattaggatggtgcaaaaggggtccagggcctcaggctgggcgcagcagccagctcccaatgacgcagaagctgcttcaaaaccccctcaacaaagaggggcacatgcaagtcaccaaagtgggaagccttcaccaaggccacacccaaagtctactgattgtctgtctaaagttcgttgattcctgg

SEQ ID NO: 224 - DNA, 478 bp, Homo sapiens
  misc_feature 428: n = A,T,C or G
ctgaaccctcgtggagccattcatacaggtccctagttaaggaacaagtgattatgctacctttgcacggttagggtaccgcggccgttaaacatgtgtcactgggcaggcggtgcctctaatactggtgatgctagaggtgatgtttttggtaaacaggcggggtaagatttgccgagttccttttactttttttaacctttccttatgagcatgcctgtgttgggttgacagtgagggtaataatgacttgttggttgattgtagatattgggctgttaattgtcagttcagtgttttaatctgacgcaggcttatgcggaggagaatgttttcatgttacttatactaacattagttcttctatagggtgatagattggtccaattgggtgtgaggagttcagttatatgtttgggattttttangtagtgggtgttgagcttgaacgctttcttaattggtggctgcttttagg

SEQ ID NO: 225 - DNA, 450 bp, Homo sapiens
cctcgtggttcatgggccggtagtcctggggttcacagaagttcgggtgctgagggaagaactccttgtagccgcctttcaggatatacatctcagggtagtagaggctggggtagtcgttgacagcacggtctcgttccctgatgaaacggcacatgcggggcccacgctcagatgagaattcacagtggaaaatgaggatgactctcttgtccaggctacagggcgcgatggggctcttcagtaggaagctctcggcgtcgcgttccaggggcaagttcaccgcagtcttgatgtgcccgccttcatattcataggggtatctgcagtctacaatcacaaacttatccacgatgttgctgaacttgcccgtcaatagggccaccatcgtttctggtgagatgtacttgaggtcttggtgctttccgtctactgtctgtaggaggaagg

SEQ ID NO: 226 - DNA, 449 bp, Homo sapiens
cctgtgtccaccacacctgggatcattttgatagctgtattcacttcactccatttgtgtacccggtcaaacttccagtccaagataaaattcccattatctgtcaccacaggaccagccttgttgacagccattcgaagttcaaccacgcccccaaacttctggctcacagctcggctcactgggacataggccattgggatgacctcgatggggattcccttgtgccactgatccccgagattcttcgaatctttcctgaaatcagcgatcacgatgaagcgactagcatagccagccacaatcttctcctgggtcaggcagcctccgccacccttgatgagattgagatcagcatctacttcatcagcaccatcgatggcaaggtcgatctctgggtgtcgatccagatcactgagggtcaagccatactgcaggatgagctggcg

SEQ ID NO: 227 - DNA, 568 bp, Homo sapiens
ccttcattttagctaagtttagaatttatattaggcaactatgatttgagtggttattcattgagtaattttccactataaagaattttattgaacatttattaaaaaataatgtaatgcatggtcaaaaaatatgtaattcatggtctggacactgacgttgtttagggatttagtcatcaaggacagccctctgttgtttctaatgccgtactaatcaagactgtatggacacttgcatcttaagtactaaggaattactagtgattgttttattttatccatgtactcttttagtatttaataattaaatacctattcttagtgtttgacactccatatttcttttttttggaaatgaaacaaatatgcagtccaaaattcaggaactactagagtgaaatgatattaagtggaaaccagagataaatgctgttaatttaacaagtagattcttctccaaagaatgatgagtgattcttgggaagataaatgttaatgttcccaatagtcaagcttgtcttgcagtagtgaaaagcttagatgagtacggatacctcatttgaaa

SEQ ID NO: 228 - DNA, 580 bp, Homo sapiens
ccaggctggttttgatctcctgacctcaagcgatccactgtcctcggcctcccaaagtgttgagattacaggtgtgagccaccatgctcgctgagagcagatatttgaaatgtcactttgagttctgagaaaaagtaaaaagccagaagacatactagatatataaatatattactgcttaaaaagatttcctaaaaagaaatgtatcaagtgtatgaatcaaagtctgaaagaaagatgaagagccaccagacttctaggtaggtttacatccatcatgttcctcttgactgcctttgtttgtcgtttagttttttgctccactcaagcctgttagaatcaccatggaatacagctccagtgggaaggccactggagaagctgatgtgcactttgagacccatgaggatgctgttgcagcgatgctcaaggatcggtcccacgttcatcataggtatattgaactgttcctgaattcatgtccaaaaggaaaataagactctaggggctccagataataagggtgaagcaagaagcatttcatttgcacatctttcttggacttgggatatacagttcc

SEQ ID NO: 229 - DNA, 228 bp, Homo sapiens
ctgcctgaggaagttgatctcgtcggtcagcccttccaggcgagactccagctctaccttgttcatgtaagcttcatccacatccttcttgatgaggacaaattcgttctccatctctgtacgcttattgatctcatcctcatacttgttcttgaagtcctccaccagcccctgcatgttgccaagctccgcctccagcttcagcttctcctggcccagagtctccag

SEQ ID NO: 230 - DNA, 149 bp, Homo sapiens
ccatattgacagaccaatctatgggactagggggattggcatcaagttgacacccttgaacctgctatggccttcagcagtcaccatcatccagaccccccgggcttcagtttcctcaatcatagaagaagaccaatagacaagatcag

SEQ ID NO: 231 - DNA, 503 bp, Homo sapiens
ctgctgtggttgctcccattacaacgggctatacggtgaaaatcagtaattatggatgggatcagtcagataagtttgtgaaaatctacattaccttaactggagttcatcaagttcccactgagaatgtgcaggtgcatttcacagagaggtcatttgatcttttggtaaagaatctaaatgggaagagttactccatgattgtgaacaatctcttgaaacccatctctgtggaaggcagttcaaaaaaagtcaagactgatacagttcttatattgtgtagaaagaaagtggaaaacacaaggtgggattacctgacccaggttgaaaaggagtgcaaagaaaaagagaagccctcctatgacactgaaacagatcctagtgagggattgatgaatgttctaaagaaaatttatgaagatggagacgatgatatgaagcgaaccattaataaagcctgggtggaatcaagagagaagcaagccaaaggagacacgggaatt

SEQ ID NO: 232 - DNA, 253 bp, Homo sapiens
ccaggctggtctcaaactcctgacctcaagtggtccacccgactcggcctcccaaagtgctgggattacagttgtgagccaccatgcccagcccccaacttgtaaacttcttaaatgcaggaactgtattttattaatctttgaatcaatattatctagcaccatggctagttaattatatatgcttcataattacctctttaaaaatcttaaaattgagagatgagttgagggtctaaattgcctttcaact

SEQ ID NO: 233 - DNA, 468 bp, Homo sapiens
  misc_feature 442: n = A,T,C or G
ccacagctaacatcattgcagcacctttactccttcggctgtgatccaatctccagctcactttttgccagcaccaacattggcctttgcagtccccctgactttcttcattctgttcttgcgttcctttcgttgctttcttgaggtctttttcttctcatacaggccatgtcttgcaagtctatgtttgggttcatttttctttgcataatccagggaatcataaatcatgccaaagccagttgtcttgccaccaccaaaatgagttctgaatccaaatacaaagatgacatccggtgtggtcttgtacattttggctagtttttcccgaatttctgtcttaggcactgtcgccttcccggggtgaaggacatcaatgaccatttgtttcctctgaagtagtcgggttggtcatgaactttctagtgcggatagttacggngtcgttcatgatggcgatctatcttc

SEQ ID NO: 234 - DNA, 354 bp, Homo sapiens
  misc_feature 34, 39, 79, 217, 225, 309, 328: n = A,T,C or G
ctgaaggagccggggagcagaaagtatatgcgtnaggtntgaggaagaaaatagattttggaagttatgagaaatgtanagagtgagttgagcatagtttgtgattttgagggcctctaacagtattaaagtagcggcagtcgctgcacacagacatgatggctaggctaaaacaggaaggtcaagttgtttggacagaaaggctacagggtgcagncctggctnttgtgtaagaattctgaccacactaaccatgcctaggaaggaaaggagttgttcttttgtaagggattgaggtttgggagattnatcggacaccgatcagcanggagagcacctgtgtttttatgagaa

SEQ ID NO: 235 - DNA, 538 bp, Homo sapiens
aaaaaaagcaacttccagggttgtcattgtacaggttttgcccagtctcctatagcatggtatagtgataactgattttttataacaatgactcagaggcattgaagatccataactatcttctgaattatcacagaaagaagaaagttagaagagtttaatgttaagtgtattaaaaatcatattctaattcttttaatttggttatctgagtatgataatataggagagctcagataacaagaaaaggcaattggttagaacactccattcccacaggatgtgcattaacagactttttactgcatatgtctttatatagtttgcaaactaattcaaccattttacacagcattaattttttttttaactgggttgacattgggctgaaacatttgcttatcatcttataattattttttcctgttctttaatggattttacccccatctgacatagtgtttggactttagtgtatgtgacacttcaagatcatctctgcccattctgatgatagttacaatgaggttacccatgg

SEQ ID NO: 236 - DNA, 411 bp, Homo sapiens
ctgttaaaaatgactacgagatgaccttcaataacgagacttccgtcatgccctgtgaggacgaccatcatttacctacggttcagtttgatttcacggggattgatgacctcgagaacaagtcgaaagactcacttgtagacatcatcgggatctgcaagagctatgaagacgccactaaaatcacagtgaggtctaacaacagagaagttgccaagaggaatatctacttgatggacacatccgggaaggtggtgactgctacactgtggggggaagatgctgataaatttgatggttctagacagcccgtgttggctatcaaaggagcccgagtctctgatttcggtggacggagcctctccgtgctgtcttcaagcactatcattgcgaatcctgacatcccagagg

SEQ ID NO: 237 - DNA, 372 bp, Homo sapiens
ccactttctgcccagggaggaggcattcctggagaggctagtgtgcattcatgtcttcccatctgacagagtatcctgaaatcagaccaagtcctgaaaacttccaaaatgggaagtatctgggaaaatgcactcttccctctcctgtagggtctcgtcccgcttctgcggtgtggtgggtctggagaagtctgtagagaagcactgcgcctttgcagtgtcttctgaagaagaagaggcgggatctcatttgcttttgaggagtcgggtgttcctggtcacggtcgcatgttgtcacgaatccagtctaggtagttggtaaccttggtgtacacacccgggacatccttctgtccacagcccaggccccag

SEQ ID NO: 238 - DNA, 463 bp, Homo sapiens
ctgctcagagtctcccattggtcagatgagaggtggggatgtgacaaggcaggctgtttagcacagtgacatgagcactggctttagagtccactgagcttgaattccatttccgccacttgttagctgatgtccttgagcaagtgacctcacctctctgagcctttgtctcatctgtaagatgggaatgatagaaaacatgcctcatgggacttttcaaataactaaaagtagaatgtccattcaacccagcaatcccactactcggtatctacccaaaggtaaagaaatcattctatcaaaagacaccggcactcgtatgtttatcgcagtacgattcacaatagcaaagtcatggaatcaacttaagtgcccatcagtgtgaactggataaagaaagtgtggtatatctacaccatggagtattatgcagccataagaaagaatgaaatcatggttgcag

SEQ ID NO: 239 - DNA, 273 bp, Homo sapiens
aaatgtctgcatgcagccagccatcaaatagtgaatggtctctctttggctggaattacaaaactcagagaaatgtgtcatcaggagaacatcataacccatgaaggataaaagccccaaatggtggtaactgataatagcactaatgctttaagatttggtcacactctcacctaggtgagcgcattgagccagtggtgctaaatgctacatactccaactgaaatgttaaggaggaagatagatccaattaaaaaaaattaaaaccaattt

SEQ ID NO: 240 - DNA, 238 bp, Homo sapiens
ccaccggggttgacctctctcgctagcagggcccacccagctcactccccgcgtcttccatcccctctaggattcccattgtcccctactccagcactaggcaggcacccccagcccactgcgactcccaccacgaaggaccccagccctctctcagccaacacggccccgcccaccgtctcagacatcgtgcttcttctggtgggccaggagtctctcctcgtcgtcgaaggtctgg

SEQ ID NO: 241 - DNA, 446 bp, Homo sapiens
cctacacgccgccgcttgtgctgcagccatgtctctagtgatccctgaaaagttccagcatattttgcgagtactcaacaccaacatcgatgggcggcggaaaatagcctttgccatcactgccattaagggtgtgggccgaagatatgctcatgtggtgttgaggaaagcagacattgacctcaccaagagggcgggagaactcactgaggatgaggtggaacgtgtgatcaccattatgcagaatccacgccagtacaagatcccagactggttcttgaacagacagaaggatgtaaaggatggaaaatacagccaggtcctagccaatggtctggacaacaagctccgtgaagacctggagcgactgaagaagattcgggcccatagagggctgcgtcacttctggggccttcgtgtccgaggccagcacaccaagaccactg

SEQ ID NO: 242 - DNA, 465 bp, Homo sapiens
aaatatcacaagtaggtcttaagtgtcatctggcatcttctttctgtagccaggtaactcttagatcttattcatcagcctgctgaacagttcctttttcagagacatagataccatccaaaaatttcctgatatccttgtttttaactgttgtggcttgctgaatcaaagccgctgaatttgaaacaagctcaatgtcatttccttcaaggattaattcatctttctgggcttgagatactgaacaagcaacacctggtctcatccgaaccctgcggatgtatttttcacccaagaaatttcggatttcaacaagagacccattctcctggataacaacgttgatgggggaagtgagcatacacagacctcatcttgtaacggaagcccagtgtaacacccttgatcatgttctgtacatgactacaaatagtccgaacggtagccagttcctttctgttaccc

SEQ ID NO: 243 - DNA, 399 bp, Homo sapiens
aaaaattttagcaggaaaacaaaagccaaaccttggaaagtacgatgatcctcctgactggcaggagattttgacttatttccgtggatctgaattacaaaattactttacaaagattctagaagatgacctaaaagccatcatcaaacctcaatatgtagaccagattcctaaggctacaaaggggacagtgggatctattttggaccgaaaagatgaaacaaagacacaggcaattgtatgtcagcagcttgatttaacccacctaaaagaacgaaatgttgaagatctttcaggaggagagttgcagagatttgcttgtgctgtcgtttgcatacagaaagctgatattttcatgtttgatgagccttctagttacctagatgtcaagcagcgttt

SEQ ID NO: 244 - DNA, 388 bp, Homo sapiens
  misc_feature 328, 329, 350: n = A,T,C or G
gtttcccaggcccactgtgcctcagagaccagggctccagcccctctcggagaagtctcagctaagctcacgtcctgagaaagctcaaaggtttggaaggagcagaaaacccttgggccagaagtaccagactagatggacctgcctgcataggagtttggaggaagttggagttttgtttcctctgttcaaagctacctgtccctaccccatggtgctaggaagaggagtggggtggtgtcagaccctggaggccccaaccctgtcctcccgagctcctcttccatgctgtgcgcccagggctgggaggaaggacttccctgtgtannttgtgctgtaaagagttgctntttggttatttaatgctgtggcatggatgaagaggagg

SEQ ID NO: 245 - DNA, 590 bp, Homo sapiens
  misc_feature 587: n = A,T,C or G
ctgccgtgtgaagcccacaataaatttaggatgaagaatacggtctgtgtatccaagacagcagtcaaagttgcttgcttctgattcgccgcagaggtggagtagcagcactgacatcaaagcagccaggagcaaactcttggtacagcacatggtttttagctcaaagaacagatctgctaaaacaaatacaagttattgattcactcttctcaacttgacagtctacctgtggtataactgtcaggtaaaaacatacatctttacaacttggtggtcccaagttaaaaaaaaaaaaaaaaaccaacaacaaaaaaaaaaacaccatttcacagacaggaaataaacaacatgaaaacagctcaagaaatacactaacgagcaaaaatatatgaatatatggggaaagaggaacgtgttgttttgacttaactgaagaaaccaagaggaaactggtctacgtatgaaaatgtgcatcctggaaagtcaggtgtcaagattttcgagtaggaatctatatgacttgaatctccccctatttcctgaataaaagtgacatctttcagtatttatacttcatggctcanaca

SEQ ID NO: 246 - DNA, 586 bp, Homo sapiens
  misc_feature 543: n = A,T,C or G
ccacggggactgttattcgcaagctggttttctagacctgttagctggaagcatggtgagcaccatttctggacgctcaggccgtgtcgggcttcagtcatctccaccacacaggtacagcagcgctttctggtagtcgcccttagtgtcttgctggatataatagtacagggacttgccgtactttctcttgaattcagacctaattttcaacatgtccacttcactgcgggagaccatgattctgatcaggaccttatctcgcgtccccttgcccttcatggagtcatacagccgatcagcaaaatacaggggcttgttctgaatgcactgaaccaggttcaggaaagcattttccaggtctcctttaacctctttcctgatgctttccaacatgtcataagggctgtaactcttgtacctatcaaatactttctggaggtggggcacgctccgctcggtcatgatgctgatccacttgggaacatcagttcctttcctcttcactccagcgtcatagagatcccgagcatcttggtcaantcagttcataatcaatgacagagccatcctctgctcttctacc

SEQ ID NO: 247 - DNA, 435 bp, Homo sapiens
ccaggctggtcttgaactcctgacctcaagtgatccgctcgtctcagcctcccaaagtgctaggattacaggcgtgagccaccgcgcccggcccatactaactgttatcacgagtgttcagttttcatatttatgctcacttgctggtccgcctgcagatgactctgaaggagtttgccataatgaatgaggaccaagatgatgaagagtttctgcagcagtaccggaagcagcgaatggaagagatgcggcagcagcttcacaaggggccccaattcaagcaggtttttgagatctccagtggagaagggtttttagacatgattgataaagaacagaaaagcattgtcatcatggttcatatttatgaggatggcattccagggaccgaagccatgaatggttgcatgatctgccttgccgcagagtacccag

SEQ ID NO: 248 - DNA, 299 bp, Homo sapiens
cctgcagagtgtccctcccttggctccagaacgaagatccacacttgaggactactctcagtcgctgcacgccagaactctgtctggctctccccgatcctgttctgagcaagctcgagtcttcgtggatgatgtgaccattgaggacctgtcaggctacatggagtattacttgtatattcccaagaaaatgtcccacatggcagaaatgatgtacacctgatagcaagaagctaattcatatgctttaaaccaatgaaggcttgtcaaagagatttagttaatggcagaccttgtgg

SEQ ID NO: 249 - DNA, 186 bp, Homo sapiens
ccatcaccatgtcacccacaccagcagcgggaagtctgttcagccgtcccttgatccccttcacggagatgatatacaggtttttggctcctgtgttgtcagcacaattgattacagctcctaccggaagacccaaggaaatccggaatttcgcaccagaggacccaccacgtcctcgcttcgaca

SEQ ID NO: 250 - DNA, 329 bp, Homo sapiens
cagattctgcgataatgtgtggacttttgtactgaatgatgttgaattcagagaggtgacagaacttattaaagtggataaagtgaaaattgtagcctgtgatggtaaaaatactggctccaatactacagaatgaatagaaaaaatatgacttttttacaccatcttctgttattcattgcttttgaagagaagcatagaagagactttttatttattctagaattgcagaaatgactacactgtgctataccagagaattccagtagaaagaaacttgtaactctgtagcctcttacatcacctttattatacagcatgaaaaacca

SEQ ID NO: 251 - DNA, 457 bp, Homo sapiens
caaaggtcgcgataatattattgacctcttcctttatcagccacaatatcttaatgcaattcagacaatgtgtccacacattcttcgctatttgactacagcagtcataacaaacaaggatgttcgaaaacgtcggcaggttctaaaagatctagttaaagttattcaacaggagtcttacacatataaagacccaattacagaatttgttgaatgtttatatgttaactttgactttgatggggcttagaaaaagctgagggaatgtgaatcagtgcttgtgaatgacttcttcttggtggcttgtcttgaggatttcattgaaaatgcccgtctcttcatatttgagactttctgtcgcatccaccagtgtatcagcattaacatgttggcagataaattgaacatgactccagaagaagctgaaaggtggattgtaaatttgattagaaatgca

SEQ ID NO: 252 - DNA, 426 bp, Homo sapiens
ctgccgctgcaccttgggaaggtggtcctgtgcctggagtggacacaagcccctttgcaaagtctctgggtcattccagaggggaggctgacctttttgattctggggacattttttccacgggcactggatctcagtccgtggagagaacaaaacccaaggcaaagatagcagagaatcctgccaacccaccagtgggtggtaaagcaaagagccccatgtttcctgctctaggcgaggccagcagtgatgatgatctctttcagtctgctaaaccaaaaccagcaaagaaaacaaatccctttcctctcctggaagatgaggatgacctctttacagatcagaaagtcaagaagaatgagacaaaatccagtagtcagcaggatgtcatattaacaacacaagatatttttgaggatgatatat

SEQ ID NO: 253 - DNA, 177 bp, Homo sapiens
cctgacagacagaagggcttggagattttttttctttacaattcagtcttcagcaacttgagagctttcttcatgttgtcaagcaacagagctgtatctgcaggttcgtaagcatagagacggtttgaatatcttccagtgatatcggctctaactgtcagagatgggtcaacaaac

SEQ ID NO: 254 - DNA, 317 bp, Homo sapiens
ctgatcaagactggagacaaagtgggagccagcgaagccacgctgctgaacatgctcaacatctcccccttctcctttgggctggtcatccagcaggtgttcgacaatggcagcatctacaaccctgaagtgcttgatatcacagaggaaactctgcattctcgcttcctggagggtgtccgcaatgttgccagtgtctgtctgcagattggctacccaactgttgcatcagtaccccattctatcatcaacgggtacaaacgagtcctggccttgtctgtggagacggattacaccttcccacttgctgaaaaggt

SEQ ID NO: 255 - DNA, 469 bp, Homo sapiens
ccataaaggcactacggcatgttcataaacaccatcaagtaaaagaaaggggaatcaagatgttctcacttcttttctgctccaccttaatactccatctagccactggtatggagcatgtcatcaactcattcttctcacaagctagcaagggaattaaacattttatcagtcaaccctatgctcaccaagtgagccaatgttacacagtgattttgtgcatccagtgactgagaactacaggcaaggataggccctgactgttaataaattggtcgtggctattactagaaaattatgggtgcaggcatttacctatacaatgacctgcttactgtggcagctaacaatatagtcaaaccagtctattaccatatgatgtcctattaacaagagagcccagttgaaggatgtttcatacttttagaaagcctaatttcttactgtaatatcctcccatccctctttt

SEQ ID NO: 256 - DNA, 219 bp, Homo sapiens
ctgaaagaaacctttgggaatggatatcagaagatttggccttaatatatttccattgtgaccagcagcaggcttttttcccccaagaagatgatcaaaacaaaggatgatctcaacaagagctgtattttaagtatttagacagttctttgttagctggtttctagttggttatctagttaccaatgctgcagtcctgcagtcacctatacattattt

SEQ ID NO: 257 - DNA, 474 bp, Homo sapiens
  misc_feature 430: n = A,T,C or G
ccaatagatttacagccatctaaagaagagcagaatgctctcaagagctgaattatgatgacttgtaggtattgattagatgagaacaccaaccccatattcagcagagagttagggaatgagaagtagaggggagatggtggtggagatcgtctttatgtagttttcaaagtcacttccgaaaaagaagatgaggtaatagttgaatatgccagcaacggacatgaggaacaggaagagtatgatgcgtttcccaaatatgtagccaggggtgctctgcgttctctctcctaggtaaccgacaaagtacttttgcctcacaaacaagtacatcagtccagcaaacgcagcaggaacttggctgcaaagtagccccgcagaccagagcacagcgaggagagtggggtacgcatctacacagttctggttngcagtgtagacccgctcaaaggcaggtgttccggtcctctggaa

SEQ ID NO: 258 - DNA, 399 bp, Homo sapiens
cggaaaatagcctttgccatcactgccattaagggtgtgggccgaagatatgctcatgtggtgttgaggaaagcagacattgacctcaccaagagggcgggagaactcactgaggatgaggtggaacgtgtgatcaccattatgcagaatccacgccagtacaagatcccagactggttcttgaacagacagaaggatgtaaaggatggaaaatacagccaggtcctagccaatggtctggacaacaagctccgtgaagacctggagcgactgaagaagattcgggcccatagagggctgcgtcacttctggggccttcgtgtccgaggccagcacaccaagaccactggccgccgtggccgcaccgtgggtgtgtccaagaagaaataagtctgtagg

SEQ ID NO: 259 - DNA, 321 bp, Homo sapiens
ctggaagaggaacatcaccaccccgtagccacaggcttgctgtccactaacttagatccctgagcacttgagaaagaacataggaagttcaacaggaagtttgaccctcatggatacttctctttaggccctgggtttcccaagtctccaacctgatcgttctttctgaccatttatgacaacttctggtttttctttgaaagcttgtttctaggtctcttccccagaatcccaggacatgagggagagaggggtcaggaggtataccatatttggtctaggcagagcttcttagacttttcagagactcagcccccaagg

SEQ ID NO: 260 - DNA, 360 bp, Homo sapiens
gtggatggcaacagtctaattgtaggatatgtaataggaactcaacaagctaccccagggcccgcatacagtggtcgagagacaatataccccaatgcatccctgctgatccagaacgtcacccagaatgacacaggattctataccctacaagtcataaagtcagatcttgtgaatgaagaagcaaccggacagttccatgtatacccggagctgcccaagccctccatctccagcaacaactccaaccccgtggaggacaaggatgctgtggccttcacctgtgaacctgaggttcagaacacaacctacctgtggtgggtaaatggtcagagcctcccggtcagtcccaggctgcag

SEQ ID NO: 261 - DNA, 303 bp, Homo sapiens
cctttactttattcagtgaaagtgtctatttagactaagaggtattttagtttcctgactcgagacatgttgagtaaaggtaatttgccagtcctgggtggggcaaatcctccagcctgatgtgtagggaagggagggggcctgaataatccctgaggagtagtagaatagcagatggaacactgagaagttatttccttgaggatagatttccacgatggaaaggaaatgagaggttctgagaggcgggctagtggcttgtactatagcataacctgcctttgctggtgtgtggcgattagg

SEQ ID NO: 262 - DNA, 433 bp, Homo sapiens
  misc_feature 424: n = A,T,C or G
gtggctcccaactttgaggccaatgccaccgtcggccgcatccgtttccacgactttctgggagactcatggggcattctcttctcccaccctcgggactttaccccagtgtgcaccacagagcttggcagagctgcaaagctggcaccagaatttgccaagaggaatgttaagttgattgccctttcaatagacagtgttgaggaccatcttgcctggagcaaggatatcaatgcttacaattgtgaagagcccacagaaaagttaccttttcccatcatcgatgataggaatcgggagcttgccatcctgttgggcatgctggatccagcagagaaggatgaaaagggcatgcctgtgacagctcgtgtggtgtttgtttttggtcctgataagaagctgaagctgtctatcctctacccanctaccactg

SEQ ID NO: 263 - DNA, 184 bp, Homo sapiens
ccagccagggctggtgctgtccccgcctacctccacttcctttcccttgctcactctggatccagtgacagcaggtgtcatgggtcaagcataaatcatatatagcattttcaggcatgttcctggtagttcttttgagtctgacattctaataaaataatttgtaaaaaaaaaaaaaaaaaaa

SEQ ID NO: 264 - DNA, 389 bp, Homo sapiens
ctgtgatgagttgataccagagtatctcaattttatccgtggtgtggttgactctgaggatctgcccctgaacatctcccgagaaatgctccagcagagcaaaatcttgaaagtcattcgcaaaaacattgttaagaagtgccttgagctcttctctgagctggcagaagacaaggagaattacaagaaattctatgaggcattctctaaaaatctcaagcttggaatccacgaagactccactaaccgccgccgcctgtctgagctgctgcgctatcatacctcccagtctggagatgagatgacatctctgtcagagtatgtttctcgcatgaaggagacacagaagtccatctattacatcactggtgagagcaaagagcaggtgg

SEQ ID NO: 265 - DNA, 475 bp, Homo sapiens
gaggaattggagaggccagaataatcagaaaagctttggagggggtaggatgtgacctacattttcagaacaagagtggagtagaaaaggcattccaggtgggataaacagcggaggcaaatacatgagagggaattaaatctgttgtgatttatttgatagtaagattgacctgcctggcatcgagttgaaatagaggcaaaagacactgaatatttgcaaggaggtccttagaatggagtgatatggaaataagcagccattataggttcttgagcaggaacattttgcatgaaaagcactgctttggaatgatgagtctagaaaggtaacactgacctctctaaggtggcattctagggagagacctgagtatttggggctgagattgagagaggagcttacttttcttggtatatttttatttactattcaagttctgcatcatgtgtgtttactgcctatttaataatta

SEQ ID NO: 266 - DNA, 104 bp, Homo sapiens
cctaggattgtgggggtaatgaatgaagcgaacagattttcgttcattttggttctcagggtttgttataattttttatttttatgggctttggtgagggaggt

SEQ ID NO: 267 - DNA, 470 bp, Homo sapiens
ctgcctgtcacagaatcccatttcaaagagacgggccatcagggctgctgtctgatcttcagaaattattagctgtgcagtgactggtggcccagcaaacagggccttgtatgcagaggcagcaacagacaaagcccccttcaccagtcctccagcaatgctgctcccatgatggtgccttgagtggtcatagctcttctgtctgctgtttacaagtcctgatgagcctctgggctctcctctgatctgatcagggactgaagaaacttctggtatggtaactggtaaatccactcctggggaaccatgatgatgtacacaaggagagctcctgggcagtgacggtggaagctccactacctctgggattaggggcactgtttccagagtctgtgaggtcgtgaggatgtcacttatgctgtgctcctgtggctggttctcccctccagggagtcttttcccagcctcag

SEQ ID NO: 268 - DNA, 369 bp, Homo sapiens
ctgggacccggaaggcgggcgctcctgtctttgtgctctttctaccgcccccgcgtcctgtcccgggggctctcctaggatcccctttccgtaaaagcgtgtaacaagggtgtaaatatttataattttttatacctgttgtgagacccgaggggcggcggcgcggttttttatggtgacacaaatgtatattttgctaacagcaattccaggctcagtattgtgaccgcggagccacaggggaccccacgcacattccgttgccttacccgatggcttgtgacgcggagagaaccgattaaaaccgtttgagaaactcctcccttgtctagccctgtgttcgctgtggacgctgtagaggcaggttgg

SEQ ID NO: 269 - DNA, 425 bp, Homo sapiens
ccaaaccaaccgcacccctgaatttctccgcaaatttcctgccggcaaggtcccagcatttgagggtgatgatggattctgtgtgtttgagagcaacgccattgcctactatgtgagcaatgaggagctgcggggaagtactccagaggcagcagcccaggtggtgcagtgggtgagctttgctgattccgatatagtgcccccagccagtacctgggtgttccccaccttgggcatcatgcaccacaacaaacaggccactgagaatgcaaaggaggaagtgaggcgaattctggggctgctggatgcttacttgaagacgaggacttttctggtgggcgaacgagtgacattggctgacatcacagttgtctgcaccctgttgtggctctataagcaggttctagagccttctttccgccagg

SEQ ID NO: 270 - DNA, 284 bp, Homo sapiens
ctggagcgctcacctggttgaattcaaagtcccagaaggccccgctggcgtgaagccggccccttacattttgcgaagtgcattatagtccttgtttttctctccctcgtgggggcaacgacccctcccctggcagtaggggtggggtaggtgactctcgctagatccctccaaagcagaccggtggcgatgtcagcggatgtcacgagctcgttagctgcgttcggggaaggttggggcgtcagggagctctcggatcacagcagcccccgccctctcctagg

SEQ ID NO: 271 - DNA, 406 bp, Homo sapiens
aaattttatttcaaaagcttggatagcttcaatatccaggttgtggcaaaatcaggacacgtgtaaaataccttacaatacattagattcccaaaaggtaccaaaaagtacagtaaaattaacacttccgttacaggaaatgtatgacgcaaataatataaaattaaaaggtgaaaaaaaggtgacactggtttcctaagatacaatttactctttacaaccagggtccacaggtccaggctgcagagcggcagcaggaagcagagcctcccacctgcttctgggggacctggtaataaaaatcagcccatgatggcgctatggcctctcagacaccacacgctgcctaaacacctagagctctggaaatagtcaacaggagagtgatttccatgggggaaatttt

SEQ ID NO: 272 - DNA, 56 bp, Homo sapiens
ctgaggttgtcagtacaatgaaaccaaactggcgggatggaagcagattattctgc

SEQ ID NO: 273 - DNA, 414 bp, Homo sapiens
  misc_feature 394: n = A,T,C or G
ccatcaatgactgcagcaaagcaattcaattaaaccccagctatatcagggcaatattgaggagagcagagttgtatgagaagacggacaagctagatgaagccctggaagactataaatctatattagaaaaagatccatcaatacatcaagcaagagaagcttgtatgagattacctaagcaaattgaagaacgtaatgaaagactaaaagaagagatgttaggtaaattaaaagatcttgggaacttggttctccgaccttttgggctctccacggaaaatttccagatcaaacaggattcctctaccggctcgtactccatcaatttcgttcaaaatccaaataataacagataacaaagataacaaaagctttacaagctgacttgganttgtgtgctgcttgccgtta

SEQ ID NO: 274 - DNA, 166 bp, Homo sapiens
  misc_feature 130: n = A,T,C or G
cctcggcctaaaggtctggagggtgagcgacctgcgagactcacaagaggggaagctgacagagatacctacagacggagtgctgtgccacctggtgccgacaagaaagccgaggctggggctgggtcancaaccgaattccagtttacaggcggatttggtcgtg

SEQ ID NO: 275 - DNA, 255 bp, Homo sapiens
atcgtgtgctgcctggaggagaagcctggagaccgtggcaagctggcccgggcatcagggaactatgccatcgttatctcccacaaccctgagaccaagaagacccgtgtgaagctgccctccggctccaagaaggttatctcctcagccaacagagctgtggttggtgtggtggctggaggtggccgaattgacaaacccatcttgaaggctggccgggcgtaccacaaatataaggcaaagaggaactgctgg

SEQ ID NO: 276 - DNA, 460 bp, Homo sapiens
aaacaaccaaaaagaattgtaagggtggcttgctgccaggcttgcactgccgttcctgggggtgtgcatcttcgggaaaggtggtggcggggcgtccactaggtttcctgtcccctgctgctccttccgtaagaaaatgaaatattctatgcctaatactcacacgcaacatttcttgtactttgtaagtcgtttgcgagaatgcagaccacctcactaaactgtaaacggtaaagagatttttacttttggtctccgtgggtcgcatctctactaaggtttacacaggaattccacctgaagacttgtgttaaagttctacagcgcgcactgttactgaacgtctttttcttcagcctatacgcggatccttgttttgagctctcagaatcactcagacaacattttgtaactgctgctgttgctttctacatacaccttataaagtgacatttcaaaa

SEQ ID NO: 277 - DNA, 348 bp, Homo sapiens
ctgttgatgccagtgtcctctaactcatgctgtccttgtgattaaacacctctatctcccttgggaataagcacatacaggcttaagctctaagatagataggtgtttgtccttttaccatcgagctacttcccataataaccactttgcatccaacactcttcacccacctcccatacgcaaggggatgtggatacttggcccaaagtaactggtggtaggaatcttagaaacaagaccacttatactgtctgtctgaggcagaagataacagcagcatctcgaccagcctctgccttaaaggaaatctttattaatcacgtatggttcacagacaattcttttttt

SEQ ID NO: 278 - DNA, 292 bp, Homo sapiens
cgcgaccattcggtggccgagagcctcaactacgtggcgtcctggaacatgagcatgctgcagacccaagacctcgtgaagtcggtccaggccacgactgagaacaaggaactgaaaaccgtcaccttctccaagctctgagagccctcgcgtcccaggccccagccagggggccggccttgtcccgcctcatccacagaaagggaggatgggcgatgacagttgtttctatgccttctgacccagtttcccagtttataactttatgacaatgagtttctcaagcccaagg

SEQ ID NO: 279 - DNA, 74 bp, Homo sapiens
ctgttgctgtcttcatgagggcagaggaggagccgggtggcagtgtggttatttggtcagagtgtcccctggga

SEQ ID NO: 280 - DNA, 197 bp, Homo sapiens
  misc_feature 160, 161, 169, 170: n = A,T,C or G
ccacaactgtgaagttagaaaagccctgtcaaagcaagagatggctagtgcttcatccagccaaagaggtcgaagtggttctggaaactttggtggtggtcgtggaggtggtttcggtgggaatgacaacttcggtcgtggaggaaacttcagtggtcgnngtggcttnngtggcagccgtggtggtggtggatatg

SEQ ID NO: 281 - DNA, 341 bp, Homo sapiens
ccttgctaaaaaggagaagcctaaaaaagataaaattcccacggcagttctgttcaactgtagcctgtgagtgcaggaataatgttcccgtggggaagcattatgcccagtggtttcttggtgtcaacgtgggaaagcccttgaggttttctgtcgctgtcaggaggaagcacgaaaactgtttatggaatccagtcgacgttcaggcaccgcgcgatgaacgcaaacatgtctgagacttcctctatcactttggctgtgggcttccccgccccgtggcccgccttggtgtccacgtggataagcagggggttgctttgcttcctgctgcggcccacgat

SEQ ID NO: 282 - DNA, 382 bp, Homo sapiens
ttttttttttttttttatgtgttgtcgtgcaggtagaggcttactagaagtgtgaaaacgtaggcttggattaaggcgacagcgatttctaggatagtcagtagaattagaattgtgaagatgataagtgtagagggaaggttaatggttgatattgctagggtggcgcttccaattaggtgcatgagtaggtggcctgcagtaatgttagcggttaggcgtacggccagggctattggttgaatgagtaggctgatggtttcgataataactagtatggggataaggggtgtaggtgtgccttgtggtaagaagtgggctagggcatttttaatcttagagcgaaagcctataatcactgcgcccgctcataaggggatgg

SEQ ID NO: 283 - DNA, 438 bp, Homo sapiens
  misc_feature 435: n = A,T,C or G
tttttttttatatcaaaacatttattttttgtgttacaaaaacacaaataaatccaagcagataatgaaataaacacatttttttagtgtcccatcctgggttctctgccctagaatgtattaagcaggtcaagtttaggttacttcaacacttcttctggatgctatgaagtctccatcttataaccatgtttctctagttcagctcgtaactgattagagaagtcatcctctacattgtcatcatcccaattatcctcccagacatgtgcatcttcatcttcatctaagccagcccagtcttcggcagggaactcttcaaactcgtcgtcttcctctaacagacctaagtctaccggctgctttttctctgacatctcgactgtccgcgcccaacacctcccagataagcagaaaagttggaaccctcactcntcc

SEQ ID NO: 284 - DNA, 238 bp, Homo sapiens
  misc_feature 216, 221, 228, 229: n = A,T,C or G
cctacccgccgcagtactgatcattctatttccccctctattgatccccacctccaaatatctcatcaacaaccgactaatcaccacccaacaatgataaccatacacaacactaaaggacgaacctgatctcttatactagtatccttaatcatttttattgccacaactaacctcctcggactcctgcctcactcatttacaccaaccacccanctatntataaanntagccatgg

SEQ ID NO: 285 - DNA, 275 bp, Homo sapiens
ccaattgatttgatggtaagggagggatcgttgacctcgtctgttatgtaaaggatgcgtagggatgggagggcgatgaggactaggatgatggcgggcaggatagttcagacggtttctatttcctgagcgtctgagatgttagtattagttagttttgttgtgagtgttaagaaaagggcatacaggactaggaagcagataaggaaaatgattatgagggcgtgatcatgaaaggtgataagctcttctatgataggggaagtagcgtcttg

SEQ ID NO: 286 - DNA, 485 bp, Homo sapiens
aaatagcttacaaggaatagtggttatatttatagaacattttataaaacagatttacacttgcaacaccaacaaaagcttgaaaataaaagtttacctaaagtaaaattggtggctgggtttggtggctcacgcctgtaatcccagcactttgggaggccaaggtgggtggatcacttgagttcaagaccagactggaggacatagcaagacctcgtttatattggggaaaaaaaaaattatcagggtgtggcatgcacctgtagtcccagctactctggaagctgaggtgggaggatttcttgagcctggaagattgaggctgcagtgagcaacaatggcaccactgcactcaaaaaaaaaaaaaaaaaattgagagtcaataactgcaataaacttttttaagtataatcaaatgagttcaactgtcacgttaagatgccttgaattcttttgattttctagttccaatttctagctttaat

SEQ ID NO: 287 - DNA, 505 bp, Homo sapiens
ccacagagatccctgacttcaatcaggatgacttggaagaggatgatgtgttcctactagatgtctgggaccaggtcttcttctggattgggaaacatgccaacgaggaggagaagaaggccgcagcaaccactgcacaggaatacctcaagacccatcccagcgggcgtgaccctgagacccccatcattgtggtgaagcagggacacgagccccccaccttcacaggctggttcctggcttgggatcccttcaagtggagtaacaccaaatcctatgaggacctgaaggcggagcttggcaactctagggactggagccagatcactgctgaggtcacaagccccaaagtggacgtgttcaatgctaacagcaacctcagttctgggcctctgcccatcttccccctggagcagctagtgaacaagcctgtagaggagctcccccgagggtgtggaccccagcaggaaggaggaacacctgtccattgaagatttcactcagg

SEQ ID NO: 288 - DNA, 465 bp, Homo sapiens
  misc_feature 40, 42, 337, 428, 461: n = A,T,C or G
caagctttttttttttttttttttttttgatttttagtananacggggtttcaccgtgttagccaggatggtctcgatctcctgacctcgtgatctgcccgcctcagcctcccaaagtactgggattacaggtgtgagccaccgcacccagcccattattattttttgagacaagtctcgctctgttgcccaggctggagtgcagtggcatgatcttggctcactgcaacctccacttcctgggttcaagcgattctcctgcctcagccacccgagtagctgggattacaggtgcgtaccaccacacccagctaactattttttgtatttttagtanagatgggatttcactgtgttagccaggatagtctcgatctcccgacctcatgatccgcctgcctcggcctcccaaagtgctgggattacangcgtgagccactgtactcggccaaagcttttanagaa

SEQ ID NO: 289 - DNA, 480 bp, Homo sapiens
gtgttcccagtgccacaccgttgaaaagggaggcaagcacaagactgggccaaatctccatggtctctttgggcggaagacaggtcaggcccctggatactcttacacagccgccaataagaacaaaggcatcatctggggagaggatacactgatggagtatttggagaatcccaagaagtacatccctggaacaaaaatgatctttgtcggcattaagaagaaggaagaaagggcagacttaatagcttatctcaaaaaagctactaatgagtaataattggaaatttccatatgatttattgttgttccttgtacataagaaacagtaatatacaacttacactgctttagaatgtaaaatggataaaaatgtgtacaaaaaaagcacattcctagaaaaaggtattggcaaatagtaaaaatgggaggtcaaaagcaaaaaaaaaaaaaaacaaaacaaaaaaaagaaaaaccaac

SEQ ID NO: 290 - DNA, 551 bp, Homo sapiens
aaatacaaaaggtgtcttgtgttgcttaatcatacagtttcgtacattttgtatagatattcctcactctacagtcacagatttggcaagattccgtgggaaatcaacatcatagcctctcagcacagcaaggtggaaagccagcaactgtaaagggatcacgctgagaatgccctgcaagcagtccactgagtggggcaccttgatcgttctttttgtgttcttaatggtctcagtatcctccttatcacaaattaccacaggccgcccctgccgagcaaccacttgctgaagagcattctgacacttggcataagtgtgatctctcatgatgatcatgatcacaggcatcaatttatccaccaaagccagagggccatgtttcaattcaccagcaaggatgccttcagagtgcatataagtaatttctttgattttcagtgccccttcaagacaagtagcataatgatagcctcgtcccattatcagaactgacttctgatgataaagttctgttgctagtttctgaatttcgtcatccatgctcagta

SEQ ID NO: 291 - DNA, 480 bp, Homo sapiens
aaattctttgtgcagagagtttcagcttcagatattcttcctgtgtctattagaccagtgacagcttgtgagagagaccacttttcaagggactggttgtaattttcaaagaatttttcgtctttaattgaagcagaaacagcagataacagtgccaagtataaatctatactctttggctgagtgttgttcactaaggccagtttatcatcagcgtgacaggctgccattagcccagcccagatagcaggatcacctggagaaaggagagctgccttctgaatggtctttagtgcagtattttttcatcttctgctgaactgcttcccatagccaactgatttaccgcagtgtacagtaatgccttctttccatgatttgagtccagaatatgggccacatttcctgctacaacacctccctttgcatttcgttgagcatactgtgcaacaactcgagacaacagagaccaaagagcag

SEQ ID NO: 292 - DNA, 294 bp, Homo sapiens
ccacaaagccattgtatgtagctttagctcagcgcaaagaagagcgccaggctcacctcactaaccagtatatgcagagaatggcaagtgtacgagctgttcccaaccctgtaatcaacccctaccagccagcacctccttcaggttacttcatggcagctatcccacagactcagaaccgtgctgcatactatcctcctagccaaattgctcaactaagaccaagtcctcgctggactgctcagggtgccagacctcatccattccaaaatatgcccggtgctatccgcccag

SEQ ID NO: 293 - DNA, 474 bp, Homo sapiens
ctgctgggcatgctgtgtgcttgcatcgtgttgtgcagaaggagtagagatcctgcttacgagctcctcatcactggcggaacctatgcatagttgacaactcaagcctgagctttttggtcttgttctgatttggaaggtgaattgagcaggtctgctgctgttggcctctggagttcatttagttaaagcacatgtacactggtgttggacagagcagcttggcttttcatgtgcccacctacttacctactacctgcgactttctttttccttgttctagctgactcttcatgcccctaagattttaagtacgatggtgaacgttctaatttcagaaccaattgcgagtcatgtagtgtggtagaattaaaggaggacacgagcctgcttctgttacctccaagtggtaacaggactgatgccgaaatgtcaccaggtcctttcagtcttcacagtggagaactcttggac

SEQ ID NO: 294 - DNA, 330 bp, Homo sapiens
tttgtgtattgcggcaagaaggcccagctcaacattggcaatgtgctccctgtgggcaccatgcctgagggtacaatcgtgtgctgcctggaggagaagcctggagaccgtggcaagctggcccgggcatcagggaactatgccaccgttatctcccacaaccctgagaccaagaagacccgtgtgaagctgccctccggctccaagaaggttatctcctcagccaacagagctgtggttggtgtggtggctggaggtggccgaattggcaaacccatcttgaaggctggccgggcgtaccacaaatataaggcaaagaggaactgctgg

SEQ ID NO: 295 - DNA, 255 bp, Homo sapiens
cctgacattcctgcctgaagcttggcgtccttgatggtctagggggcttccaaggtgatcgggcagtgtcagtcttcagccgctaagccgagaagatctgggaaggagtcagtcagagagccttgggccagagttccaggggctctgggagtggctgccaggtgagttgaacagtccgattttcagtggggtcccacacagatgggacgcggcttaggaggaatccggggctgcgggcattccttggcccagtgg

SEQ ID NO: 296 - DNA, 109 bp, Homo sapiens
  misc_feature 39, 57, 79, 96: n = A,T,C or G
ttgggcggatagcaccgggcatattttggaatggatgangtctggcaccctgagcantccaacgaggacttggtcttanttgagcaatttggctangaggatagtatgc

SEQ ID NO: 297 - DNA, 338 bp, Homo sapiens
ctgctgcctggtgtactcccagatcagcagggctccactcacatggacattcagggagcggataatgccctgttgaggaatttccacacaaacgtccaactgttggatcagatttgctggaattccctcacgttcatttcccaacaagagcagagatttctcaggaaagcaatattgggttaggtctaaacttttggcagtttgttccactccaatgatggtataaccttctgttttcttctgctgcagataatcaattagctgaggtggttttacctccactagaggaagccactgttctgcagagacactgaggtgctgaaactgtttgtcgctga

SEQ ID NO: 298 - DNA, 476 bp, Homo sapiens
aaaaaaacagaaaggggaggaggatgaccttaactacaaataatattccactgcaacattattgctgtaaaacttccaagctggctgttcttccagatgctctcttttgatggctgtagtggctgacagatttatatttacatgttcaaaacaattaatgcttccatttattcatagattctctgaggttcccgtagaaccacaccaccttctgtcatggcactttgtagtcgtttcatgagtggaggccgaaaccacaaccttgccattctgatgctccacaagtgcttctacatgatgctgagtccttataactcgcaacctgtgctagaactcacgggagggaaacaccgtccgccagccccgctctttcctggctacagataaaagctccaggttccgggggttccggttggtgaattctggggcgacagcttcattttccacagggtccacttcaggtttcgctgccggct

SEQ ID NO: 299 - DNA, 493 bp, Homo sapiens
  misc_feature 218: n = A,T,C or G
ctgtgaaggaaagaattgccaaattctttggaaaagatattagcacaacactcaatgcagatgaagcagtagccagaggatgtgcattacagtgttcatgaagtctttagtcgaaaccatgctgctcctttctccaaagttctcacctttctgagaagggggccttttgagctagaagctttctattctgatccccaaggagttccatatccagaagnaaaaataggccgctttgtagttcagaatgtttctgcacagaaagatggagaaaaatctagagtaaaagtcaaagtgcgagtcaacacccatggcattttcaccatctctacggcatctatggtggagaaagtcccaactgaggagaatgaaatgtcttctgaagctgacatggagtgtctgaatcagagaccaccagaaaacccagacactgataaaaatgtccagcaagacaacagtgaagctggaacacagccccaggtacaaactgatgctc

SEQ ID NO: 300 - DNA, 494 bp, Homo sapiens
  misc_feature 472: n = A,T,C or G
gagcggccgcccggcaggtctgccaaggagaccctgttatgctgtggggactggctggggcatggcaggcggctctggcttcccacccttctgttctgagatgggggtggtgggcagtatctcatctttgggttccacaatgctcacgtggtcaggcaggggcttcttagggccaatcttaccagttgggtcccagggcagcatgatcttcaccttgatgcccagcacaccctgtctgagcaacacgtggcgcacagcagtgtcaacgtagtagttaacagggtctccgctgtggatcatcaggccatccacaaacttcatggatttagccctctgtcctcggagtttcccagacaccacaacctcgcagcctttggccccactctccatgatgaaccgcagcacaccatagcaggccctccgcacagcaagccctcctaggagtttgtaacgcagagactctgcctgggcnatggcacacagacctctagtgg

SEQ ID NO: 301 - DNA, 450 bp, Homo sapiens
  misc_feature 432: n = A,T,C or G
tagagccggagctgccgcgccagtcgcctagcaggtcctctaccggcttattcctgtgccggatcttcatcggcacaggggccactgagacgtttctgcctccctctttcttcctccgctctttctcttccctctcgtttagtttgcctgggagcttgaaaggagaaagcacggggtcgccccaaaccccttctgcttctgcccatcacaagtgccactaccgccatgggcctcactatctcctccctcttctcccgactatttggcaagaagcagatgcgcattttgatggttggattggatgctgctggcaagacaaccattctgtataaactgaagttaggggagatagtcaccaccattcctaccattggttttaatgtggaaacagtagaatataagaacatttgtttcacagtatgggatgttggnggtcaagatagaattagg

SEQ ID NO: 302 - DNA, 234 bp, Homo sapiens
cctgaaggaagagctggcctacctgaagaagaaccatgaggaggaaatcagtacgctgaggggccaagtgggaggccaggtcagtgtggaggtggattccgctccgggcaccgatctcgccaagatcctgagtgacatgcgaagccaatatgaggtcatggccgagcagaaccggaaggatgctgaagcctggttcaccagccggactgaagaattgaaccgggaggtcgctgg

SEQ ID NO: 303 - DNA, 481 bp, Homo sapiens
  misc_feature 417, 461: n = A,T,C or G
gttgcttccttgaagatgggactccttgggtatcaagacctatgccacatcacactggggctagggaagtaggtgatgccagccctcaagtctgtcttcagccagggacttgagaagttatattgggcagtggctccaatctgtggaccagtatttcagctttccctgaagatcaggcagggtgccattcattgtctttctctcctagccccctcaggaaagaaggactatatttgtactgtaccctaggggttctggaagggaaaacatggaatcaggattctatagactgataggccctatccacaagggccatgactgggaaaaggtatgggagcagaaggagaattgggattttagggtgcagctacgctcaccctaaacttttggtggcctggggcatgtcttgaggcccanactgttaaccaggctctgctggcctgtttactcgtcaccacctntgcacctgctgtcttgagac

SEQ ID NO: 304 - DNA, 338 bp, Homo sapiens
aaagttctttatagggttagggtgtgggaaaatgctatattaataaatctgtagtgttttgtgtttatatgttcagaaccagagtagactggattgaaagatggactgggtctaatttatcatgactgatagatctggttaagttgtgtagtaaagcattagggtcattcctgtcacaaaagtgccactaaaacagcctcaggagaataaatgacttgcttttctaaatctcaggtttatctgggctctatcatatagacaggcttctgatagtttgcaactgtaagcagaaacctacatatagttaaaatcctggtctttcttggtaaacagatttt

SEQ ID NO: 305 - DNA, 446 bp, Homo sapiens
ggtcgtcccgctcctaaggcaggaagatggtggccgcaaagaagacgaaaaagtcgctggagtcgatcaactctaggctccaactcgttatgaaaagtgggaagtacgtcctggggtacaagcagactctgaagatgatcagacaaggcaaagcgaaattggtcattctcgctaacaactgcccagctttgaggaaatctgaaatagagtactatgctatgttggctaaaactggtgtccatcactacagtggcaataatattgaactgggcacagcatgcggaaaatactacagagtgtgcacactggctatcattgatccaggtgactctgacatcattagaagcatgccagaacagactggtgaaaagtaaaccttttcacctacaaaatttcacctgcaaaccttaaacctgcaaaattttcctttaataaaatttgcttgt

SEQ ID NO: 306 - DNA, 267 bp, Homo sapiens
  misc_feature 193, 213, 214, 219, 244: n = A,T,C or G
ctgcagccgctgcagctactcctgctgtccgcaccgttccacagtataaatatgctgcaggagttcgcaatcctcagcaacatcttaatgcacagccacaagttacaatgcaacagcctgctgttcatgtacaaggtcaggaacctttgactgcttccatgttggcatctgcccctcctcaagagcaaaagcnaatgttgggtgaacggctgnnccctnttattaagccatgcaccctactctngctggtaaaatcactggcatgtt

SEQ ID NO: 307 - DNA, 219 bp, Homo sapiens
aaaaatctaatctgccagtttagcgttttccaccaactcggggagctgaaactttcacaggcttcacaatcttttgcttaggtgctgcctttgtaggtgccttagcagcagccattgcagtctttttagatgcttgcttagccttttttgcttccttagcagccctgatagcttgttctcgttgagcctttctaacttcaggtttctgattcctcttgg

SEQ ID NO: 308 - DNA, 374 bp, Homo sapiens
ccacaaatggcgtggtccatgtcatcaccaatgttctgcagcctccagccaacagacctcaggaaagaggggatgaacttgcagactctgcgcttgagatcttcaaacaagcatcagcgttttccagggcttcccagaggtctgtgcgactagcccctgtctatcaaaagttattagagaggatgaagcattagcttgaagcactacaggaggaatgtaccacggcagctctccgccaatttctctcagatttccacagagactgtttgaatgttttcaaaaccaagtatcacactttaatgtacatgggccgcaccataatgagatgtgagccttgtgcatgtgggggaggagggagaagagatgtacttttt

SEQ ID NO: 309 - DNA, 496 bp, Homo sapiens
  misc_feature 402: n = A,T,C or G
aaattgcatttttacaagttgttttttaattagtgttctatttacattgcagaacttccaccaactgcagtagtttaactttggcacaacattaagttccatttcttttgggtattggatcctgctttttgagtgtgtatgccccaaaacgttttcaatgtcatcaaagattgggcaaattcacagtaaatcagacatcttgagttgaagaattgattctccttcaacgttttaggcagatttcagtcatctgatttagacagcttccgtttcacatgtcgtggaggttcccaagtgtcactatcatctgtttcttcttcatcctcttcctggtcatcaataacttcatcttcctcctcattttcctcaaataattctatacctaattctgatcttctctgnctttctgcaaaccactctctgacctgctcatagcccatatgtgatttgttaacaagttcatcaaggtcttgctcattaagaaacttgtgcttca

SEQ ID NO: 310 - DNA, 245 bp, Homo sapiens
tcggaagtgagcaaaactgccgcaagtctgcagcccggcgccaccatcctgcagcctcctcctgaccacggacgtttccatcaggttccatcccgaaaatctctcggttccacgtccccctggggcttctcctgacccagtccccgtgccccgcctccccgaaacaggccactctcctcggccccctccatcgggctgaggaagcacagcagcatcttcaaacatgtacaaaatcgattggcttt

SEQ ID NO: 311 - DNA, 294 bp, Homo sapiens
ctgtagccaaaaagatgctggggcagattgtggacaagtagaagcacctccttcccctctgcgacattgaacggcgtggattcaatagtgagcttggcagtggtgggcgggttccagaaggttagaagtgaggctgtgagcaggagcctctgccaggggatgcaccatctgtggggaggggccgagggagactccatggtctctgctgtctgctctgtcctcctctgtggagaagagcttgagttccaggaacgttttgtcaaggctgctgtgactgtctggtctgctgtcgta

SEQ ID NO: 312 - DNA, 522 bp, Homo sapiens
  misc_feature 394: n = A,T,C or G
tgagcggccgcccggcaggtaaaaaaaaaaaaaaaaaaaaaaaaaaaaaagcttgtacaaaacgagggcgaaggtaccgaaagcacagtaatcactggtgtcgatattgtcatgaaccatcacctgcaggaaacaagtttcacaaaagaagcctacaagaagtacatcaaagattacatgaaatcaatcaaagggaaacttgaagaacagagaccagaaagagtaaaaccttttatgacaggggctgcagaacaaatcaagcacatccttgctaatttcaaaaactaccagttctttattggtgaaaacatgaatccagatggcatggttgctctattggactaccgtgaggatggtgtgaccccatatatgattttctttaaggatggtttanaaatggaaaaatgttaacaaatgtggcaattattttggatctatcacctgtcatcataactggcttctgcttgtcatccacacaacaccaggacttaagacaaatgggactgatgtcatcttgagctc

SEQ ID NO: 313 - DNA, 517 bp, Homo sapiens
aaagaaagaaagaaagtgggggaggccaggggggcaagggacagaacatgggggagaaacaaaggtggtcagttggggaggggagctcctgggctctccctggctgccctggggtggggctgagcctcagttggagtcagagtctgaggagtcccctgaggaggaggagctggagctgctgccctcggactcattatcttcatcctcatcgtcatcctcgtcgtcgtcttcgtcctcgtcatcctcttcattctcatccccatcctcgctctcgtcctcgccgctggactcagaggagtcgccgccatcttcagaggagtccccattctcatcatcttcctcttcttcatcctcgtcctcgtcatcctcatcctcttcatcatcctcctcggactccgacttggactgcagagtagtccggctggatttggggtttgggcctcgcagcttggtcatgctcttacgtttattggagatgtactctttatatgctgcacggtcctggggagacaggctc

SEQ ID NO: 314 - DNA, 486 bp, Homo sapiens
  misc_feature 287: n = A,T,C or G
aaatgttttaggcaacctaagaacaaatgtaaaagtaaagatgcaggaaaaatgaattgcttggtattcattacttcatgtatatcaagcacagcagtaaaacaaaaacccatgtatttaacttttttttaggatttttgcttttgtgatttttttttttttttttgatacttgcctaacatgcatgtgctgtaaaaatagttaacagggaaataacttgagatgatggctagctttgtttaatgtcttatgaaattttcatgaacaatccaagcataattgttaanaacacgtgtattaaattcatgtaagtggaataaaagttttatgaatggacttttcaactactttctctacagcttttcatgtaaattagtcttggttctgaaacttctctaaaggaaattgtacattttttgaaatttattccttattccctcttggcagctaatgggctcttaccaagtttaaacacaaaatttatca

SEQ ID NO: 315 - DNA, 122 bp, Homo sapiens
ccactgcaggggatggcctgatcgagctgcgcaagctggaagctgcagaggacatcgcgtaccagctctcacgctctcggaacatcacctacctgccagcggggcagtccgtgctcctccag

SEQ ID NO: 316 - DNA, 442 bp, Homo sapiens
aaattccctgttaagttcccctccataatttttatgttcttgtgaggaaaaaagtaaaacatgtttaattttatttgactttcgcattgcttttcaacaagcaaatgttaaatgtgttaggacttgtactagtgttgtaactttccaagtaaaagtatcccctaaaggccacttcctatctgatttttcccagcaaatgaggcaggcaattctaagatcttccacaaaacatctagccatctaaaatggagagatgaatcattctacctatacaaacaagctagctattagagggtggttggggtatgctactcataagatttcagggtgtcttccaactgaaatctcaatgttctcagtacgaaaaacctgaaatcacatgcctatgtaaggaaagtgctattcacccagtaaacccaaaaaagcaaatggataatgctgg

SEQ ID NO: 317 - DNA, 484 bp, Homo sapiens
ctggcatgaagaaggaatagagcatggacacgccctgggacagcatggtgatctctaatttgtgctctgtcttaaaatagtcgaggaactgtttgagggtcatctcctcaccattaggctgcagcccttgtacctcaaagcgatcccacaatgtccactcttggttatagtactggtgacgtggtgcggcaaggggttcagagaaaccaaagaaaggcagggccaagttgaggaaaccattcttgtaggagtcaagctgtcggtgcccctgcacaaccttgtacagctccagacacacaaggccaaccacggctgctgtggtcgtggcaatggctgggatgatcttccctgcaatcagcttgctcttgtgccggtctgcagaaggaatgtcatagttttctgcccggaggttggatgcagccacgatgaaatccatatgaaagttgctgtcatcatccttctcaaagtcaatggggtacatctt

SEQ ID NO: 318 - DNA, 395 bp, Homo sapiens
  misc_feature 298: n = A,T,C or G
ccagggtgcttttggaaacatgtgtcgtggaggccgaatgtttgcaccaaccaaaacctggcgccgttggcatcgtagagtgaacacaacccaaaaacgatacgccatctgttctgccctggctgcctcagccctaccagcactggtcatgtctaaaggtcatcgtattgaggaagttcctgaacttcctttggtagttgaagataaagttgaaggctacaagaagaccaaggaagctgttttgctccttaagaaacttaaagcctggaatgatatcaaaaaggtctatgcctctcancgaatgagagctggcaaaggcaaaatgagaaaccgtcgccgtatccagcgcaggggcccgtgcatcatctataatgaggataatggtatcatcaagg

SEQ ID NO: 319 - DNA, 458 bp, Homo sapiens
ctgtgatggcttggagaaacagtgtaaaccggcagtgtaaacaagagcagggcatgtatgagtagttgagaacggtgaataggagtatgactagacagaagatagtagggatgacaagttttttggggcacagtctaagttggtcgggtgtctggaatgagaatgggacctaataaaaagaagcgtctatacaggagcttaaatgggctgtaccttgtagcattctgaggacaggtctgacttctgaggagggaaagtggtaaaagtattgtccagtcctttttaagttggtggctgagcttgttgaggtgtgtttttaatagaccattagtctgtcactgaatactaagagcctgaaaaactgcttggctgatttgactaataaaggctggtctgttatcagactgtatagaggtgggaaggctaaactgaggaattatgtctgacagaagggaaga

SEQ ID NO: 320 - DNA, 498 bp, Homo sapiens
aaacatgatagtccataaccattttgaaatgctgggcaaactacatgaagttatttataattaattcacagctaatcaggcattttgaaagcttaattggattcaaaaaccataatgttggaatttggtaaaattttaatgttgatttttactgtgaaaaggtttttataagatatacacaccctagtttaatgttgtgtcttggtgtggatttacagatttactacaggtattctgaaccaggaacacaatcaggtttcaggccagtttgatactggctgtccttaattctaatatgagagtaggacatcatactaaatgttatgtcagtgggactgtactgtctgtggaacttagcaaattaatcattttcttcagacttgaaggagagtgataaataaaatttggagtcataggatattgatgcacaatttaaggattaaacatttttaatcaattgtggatgatggcttattaaatgttgacttcctagtataa

SEQ ID NO: 321 - DNA, 283 bp, Homo sapiens
ccacagcctgagtgacgaatttcctactgaatgtaccaagttccaatttttaagggggggaaaggtttcaaatggggaaaaacacacaaaaaaaaatcactaaaaattcccacaaatcttgtttctggcactttagaaaaactgcaaaaaaatacgtaataaagaatacatatatatatatctacacacaaattatatatctatctatctatacagcggaaccacaagagagactgaggaaggatttttttcaatgtccttttccaaaagtggcagtaagcag

SEQ ID NO: 322 - DNA, 240 bp, Homo sapiens
ctgtcaccttggacttgttggagatgcaggggctagaaaggaaatgacagagtgtacaggccccttcgaccccgtgtcccataggtggtggcccccagacacaccctctctgctggcagtgcagaacatgcatcccaataccctagaggagaaacaccaccccagggagagccctttctgctccaacctcctgggcaggtcccaggttggggcagcagccatctgcaggtgtttgtcagg

SEQ ID NO: 323 - DNA, 317 bp, Homo sapiens
  misc_feature 58, 173, 175, 244, 264, 301, 304, 305, 306, 314: n = A,T,C or G
ccaattcttcttctcccccccacccaaagacatgtgagcaactgctaatgaaaagcantaaacagccgcttaggctatagcagtttcaacttcactctgaggtgaagattccaattacattcgagacttaagttctttcaattttttcctaacaaaagttcctgagtccagtntntacaatattacagcactagcagatcagtgtctacaactcatctttttctgctgtatcctcttcaccagntgggggagggcctgcacttncatagagtttgctgataattggttgaacaatttcttncannnccttcttntta

SEQ ID NO: 324 - DNA, 478 bp, Homo sapiens
  misc_feature 394: n = A,T,C or G
ctgttcttaggggtcactgagcgtctacctcctcctccagaggaggctggctcagaacgcctagaggagggggccggggatgcaccccccaccagaggctgccttcagcgtctcacgggtgcaggacagcgctcaggcttgggctctaagctctgtgtctagtgtagaacatggggaaggagcatcttaggaactgctgaagtaacttcttactgctctcacaattctaaggaagcgggagaacggcctcctaccaacagcgcccaccccagagctgcctgggaaagggcagttttactgaaaggtgctttactgttcacctgcatctttcagcagctcccctcctgccctcacctggtcttttccctctttatcccaagcctttatgcttgantcccttccccaggggctgcccacccgacagttccaggcattccctacctgagcttcttgtctgcttttccttctcccactgcaa

SEQ ID NO: 325 - DNA, 141 bp, Homo sapiens
ggaagggctgggggcctgaataatccctgaggagtagtagaatagcagatggaacactgagaagttatttccttgaggatagatttccacgatggaaaggaaatgagaggttctgagaggcgggatagtggcttgtactat

SEQ ID NO: 326 - DNA, 439 bp, Homo sapiens
aaacaaagcagtgcagttcttagccaagggtaagtactgcaactgtcgagagcatcttgtcttccacacagttgggtgactctccgttttgacacaaagataagccttgcccttgtttccttttgggagggatatatccactgagatgagaggccaaactccgtttttcacgagattttttgactttgagcttcattttcttcttgtcaggatcatgtacaacagcatgcctagtgagactttgtttcattgcaaatgttttgccacagccagcatgttcacacacaaaagggcggctttcctcatggaaggagaggatatggctttggagattaaacacagttgtataggttcttccacagccttctcttggacagcgacatacatccctttctggggcatgagttttcatgtgttgcttaaggtaatctttgcgttt

SEQ ID NO: 327 - DNA, 538 bp, Homo sapiens
aaagatcaatttccccagagggtgtgcaatgcatcataaaatggcccttttttgaggatgggagaggaagggttgggcaggatggaatattaaattgtaacatgataaacatgcaagactgttatccaatctagataatttatatacattttgatgacttaggaaaacaaagcaatcatttgtgacaagcctaaaaagcttgacatatttaacatacttaggaactttttttgtgcggtgggaattctctaattgtatcatgtgggccttttgaaagtaacaaacagaaggccagtctgttgcaagtttgctgctgaacatcacattccaccctaagaaaacacaaggtggattgcatcgagggtggataccttaccttagcacagaaggaaaaagtatgtcagtgcaaagtatggactaaactgctttcaggaaaaaagttgtaaaaattgatacaggttggaaaagggaattttccttcccggcttggagtcctcccaatttaaggcagaacccatccactccaatttctgcagtt

SEQ ID NO: 328 - DNA, 374 bp, Homo sapiens
ctggctcttacctcctggctttctctcctacaaacacacccattccttgggggcttgtaacacagtgcgaggtgggtcaccaacaggcatcagactggtgtagtcatcagcgggtagctggtaggcttggaagacgctgagcagatccttcataccagccgtgtatgggacaccctgcatgcggaccaaggctcctgactgggacaacactgaggtgggagcagaggccagggcagcagtgggtgtagtgaggtagcccacagtggtgggggagactggggggcttgggtagtaggctgtgtagttcaggtagagttgagtggctggccctggatagtaggcaacaggggtgggggcagcaggcaccctggcag

SEQ ID NO: 329 - DNA, 270 bp, Homo sapiens
ccaggtagaggcccaggagcagggccagcacctccatcaccacccacaccagcgctgtgcttgcacacaggcccagcacctccgggaagaaccttttctgaatgcccagtgccatcccagccaggagcacgtaagtaatgaaggccatcgtggggatatagaggtcaggggcgttgaggtcttgccgggggggcagaggagcatcacgactgtactgcacttcccagttctggtgtgtgtaggggaagaccagcagccctagcttcttgg

SEQ ID NO: 330 - DNA, 402 bp, Homo sapiens
aaaataagcacaccaagttatatgactaatataacttgaaaattttttatactgaggggttggtgataactcttgaggatgtaatgcattaataaaaatcaactcatcattttctacttgttttcaatgtgttggaaactgtaaaatgatactgtagaacctgtctcctactttgaaaactgaatgtcagggctgagtgaatcaaagtgtctagacatatttgcatagaggccaaggtattctattctaataactgcttactcaacactaccaccttttccttatactgtatatgattatggcctacaatgttgtatttgttatttattaaattgtgattgttttattattgtttatgccaaatgttaactgccaagcttggagtgacctaaagcatttttt

SEQ ID NO: 331 - DNA, 351 bp, Homo sapiens
ctgggaaattgagtttttgactgaaacatggagccttcactgctttttttctggttcctatgaagatttggaacatagaaaacacaaaaactcaccttaaaatttgagcaggtcgttgatggcaaaaataattttaaggaaaaaggaatattcttatgtagttattctaaagtttaaggagcgttgttgaccataatattgcttagttttcttactgctgttaagtaagtaaattgtttcaaagtaggttttgtgtgtgtgtgcctagtgtaaaagaactgaaattttgatgcttacagcacttggctcgtgcatttgtatcaaaatttgcctgcctctttatgagggagg

SEQ ID NO: 332 - DNA, 511 bp, Homo sapiens
  misc_feature 92, 472, 473: n = A,T,C or G
cctatgttttgaacgagaccaatctgttggagaccctaaaattgacttaattagaacattaaatattcctgtattgactgtcatagagtggncccaggtgcacttcctcagggagatcatcgaggccatgttgaaagcctatcagcagaagctctttgtgactcacacagttgacgaattgctctggggctacaaagatgaaatcttgtcccttatccatgttttcaggcccgatatctctccctattttggcctattctatgagaaaaatgggactaatgatggagactatgtttttctaactggagaagacagttaccttaactttacaaaaattgtggaatggaatgggaaaacgtcacttgactggtggataacagacaagtgcaatatgattaatggaacagatggagattcttttcacccactaataaccaaagatgaggtcctttatgtcttcccatctgacttnngcaggtcagtgtatattactttcagtgactatgagagt

SEQ ID NO: 333 - DNA, 342 bp, Homo sapiens
ctggcggtgctcggcgcggcgctggcggccgcagccctcgtactgatttccatcgttgcatttacaactgctacaaaaatgccagcactccatcgacatgaagaagagaaattcttcttaaatgccaaaggccagaaagaaactttacccagcatatgggactcacctaccaaacaactttctgtcgttgtgccttcatacaatgaagaaaaacggttgcctgtgatgatggatgaagctctgagctatctagagaagagacagaaacgagatcctgcgttcacttatgaagtgatagtagttgatgatggcagtaaagatcagacctcaaaggtagctttt

SEQ ID NO: 334 - DNA, 280 bp, Homo sapiens
cgcagaagcgagatgacgaagggaacgtcatcgtttggaaagcgtcgcaataagacgcacacgttgtgccgccgctgtggctctaaggcctaccaccttcagaagtcgacctgtggcaaatgtggctaccctgccaagcgcaagagaaagtataactggagtgccaaggctaaaagacgaaataccaccggaactggtcgaatgaggcacctaaaaattgtataccgcagattcaggcatggattccgtgaaggaacaacacctaaacccaagagggcag

SEQ ID NO: 335 - DNA, 447 bp, Homo sapiens
tccgggaagatggcggccgtgcaggcggccgaggtgaaagtggatggcagcgagccgaaactgagcaagaagtggtggtaatcattagttccagggtgctctgccatgttgacgcaagctgctgtaaggcttgttagggggtccctgcgcaaaacctcctgggcagagtggggtcacagggaactgcgactgggtcaacttgctcctttcacagcgcctcacaaggacaagtcattttctgatcaaagaagtgagctgaagagacgcctgaaagctgagaagaaagtagcagagaaggagaccaaacagaaagagctcagtgagaaacagctaagccaagccactgctgctgccaccaaccacaccactgataatggtgtgggtcctgaggaagagagcgtggacccaaatcaatactacaaaatccgcagtcaagcaattcatcag

SEQ ID NO: 336 - DNA, 196 bp, Homo sapiens
  misc_feature 119, 170, 183: n = A,T,C or G
aaaaaaaagacatttattcagcgtcacgatcagactgttacatttagcaatcaacagcatggggtgcaaaaaaaaaaaaatctacattaaaaccctttgttggaatgctttacactttncacagaacagaaactaaaataacctgttatacaattagtcacaaatacagncctcgagtttttngcccatacacatg

SEQ ID NO: 337 - DNA, 419 bp, Homo sapiens
ctgacgcgtcatttcagcatttttccagccttttttgaagctctctaggaagccttcccgtggaggtaatttgtccaggtcatgtacaacacgctgggggattttaagtacagtgcgtactgctggaatccggagacaggatacttggaccagggaaaacagattggaggagagccagtacataaacactgccgtggggaaatgcatggttatgggcaaggttatcaggggcatcattctgatgacatttctcatccactgaaggtcagaactttgcacacctgtctcagcacctagctcaagaacagcccacattgtagcagtgactgccagtggtaatatgtagatgggatcggataccgtgagatcctggaaccaccagaggccacctgtctgcaggctgggcacaggaaggttgg

SEQ ID NO: 338 - DNA, 491 bp, Homo sapiens
aaatgcaaatttttacattaaaatatgtttataaatcatagtagttgttttccctcttgattcaacatttctccctcccctaacaggagccctagaacctgaagagcatgtacattactaacgagatatacaatccagccaccctgtccaaactggaatctgattactaatggactacactcgaggctgcccccaagggatgggaagcagtaactacgctctcagggagaatgggtactgaggatgccaccagtcaaagagccgaacgctgtgcactgggtccaggatgacttgcacaccctgttcactgcgcagtttccgaccaccatggacaggggaatcttggaacaccagtctcactcgatgatgccgcatgtccgtgctcacattgatagtaaacagagtaaatatcattcccatgacaatcggaataaagatgaaattgagggtggtgacctgcagtaggcagcagtcctggtctggattggtat

SEQ ID NO: 339 - DNA, 323 bp, Homo sapiens
ccatacagggctgttgcccaggccctagaggtcattcctcgtaccctgatccagaactgtggggccagcgccatccgtctacttacctcccttcgggccaagcacacccaggagaactgtgagacctggggtgtaaatggtgagacgggtactttggtggacatgaaggaactgggcatatgggagccattggctgtgaagctgcagacttataagacagcagtggagacggcagttctgctactgcgaattgatgacatcgtttcaggccacaaaaagaaaggcgatgaccagagccggcaaggcggggctcctgatgctgg

SEQ ID NO: 340 - DNA, 512 bp, Homo sapiens
gctccccctactgcctatatcgacttcgcccggcagaagctagatcccaagattgctgtggctgcgcagaactgctacaaagtgactaatggggcttttactggggagatcagccctggcatgatcaaagactgcggagccacgtgggtggtcctggggcactcagagagaaggcatgtctttggggagtcagatgagctgattgggcagaaagtggcccatgctctggcagagggactcggagtaatcgcctgcattggggagaagctagatgaaagggaagctggcatcactgagaaggttgttttcgagcagacaaaggtcatcgcagataacgtgaaggactggagcaaggtcgtcctggcctatgagcctgtgtgggccattggtactggcaagactgcaacaccccaacaggcccaggaagtacacgagaagctccgaggatggctgaagtccaacgtctctgatgcggtggctcagagcacccgtatcatttatggaggctctgt

SEQ ID NO: 341 - DNA, 463 bp, Homo sapiens
ctggtagggagcaattctattatttggcattgcatggctgggttgaattaaaacagggagtgagaacaggtgagtctagaagtccaactctgaaaaggaccactgtacatttgaacacacggctgtgttaaagatgctgctaatgtcagtcactgggtgcactaaaggatctcttattttatgtaaaacgttgggattgacaagatagatctgatactctgttaagttaccctctgaagctacttcttgtgaaatactaatgacagcatcatcctgccaagcgaaagaggcaggcataagcaaggacaaattaaaagggggtaagagccttatcatgatgaggagtcttgttttgacatcttgggaaaagctgtccatagtgtgaagtcgtcaatttctcaccatggtttgcagtttgcctgtctctagttaggtgaagtctctgagtggcacacacctcagg

SEQ ID NO: 342 - DNA, 419 bp, Homo sapiens
cctagttggatgcgggtcggtcctgcccaaggccccagtgaggggagccgaggctaggaaggggcaagttttatgtgtttgggagggggtgtctcttcccggcctctgcgtcttccccctggagcgtcagtatggtcgggctctggtgacccagccgctttgcctcccgactttgggaagagtagcaaggagaggtcctggcaagtacaccctgggtgacaaacggctatgagagttcccaggtgatttctcgagcagcttcagtttaccggagcccagccaggagagagaattttagcacaggaaacgcaatcccgtgtccaagctcctagaatacccaggactgagaaccaaagcaacagacttttcccagggagccacactgcctccccacctcttctttaacccctcacttggca

SEQ ID NO: 343 - DNA, 390 bp, Homo sapiens
ccttggtgtcttcacatacattctctgagccaacatctatccagcagccctgacctcctgctataatttaagtctatttccttttaatctaataagagttgatagtaaaaaggcaggtgatggaaatcagtgtataaatcacaatggagtatattggcaactccacagcttatagtttgataaaggcaaatacatgaaaaataaaaatgctactaatgccccaaggtgtctatcaaaatgatgtagggggtatcttaaactgtccaaggcaatcatgcattgaactttattcctatgcagagccaaaacgaatagtgttgataaaatagctaaactttctaaactggagaggaggctacagtgccagagagttattgtctcttttgcttt

SEQ ID NO: 344 - DNA, 531 bp, Homo sapiens
ctgaagaaatcgaaaggatggttaatgatgctgagaagtttgctgaggaagacaaaaagctcaaggagcgcattgatactagaaatgagttggaaagctatgcctattctctaaagaatcagattggagataaagaaaagctgggaggtaaactttcctctgaagataaggagaccatggaaaaagctgtagaagaaaagattgaatggctggaaagccaccaagatgctgacattgaagacttcaaagctaagaagaaggaactggaagaaattgttcaaccaattatcagcaaactctatggaagtgcaggccctcccccaactggtgaagaggatacagcagaaaaagatgagttgtagacactgatctgctagtgctgtaatattgtaaatactggactcaggaacttttgttaggaaaaaattgaaagaacttaagtctcgaatgtaattggaatcttcacctcagagtggagttgaaactgctatagcctaagcggctgtttactgcttttcattagcagttgct

SEQ ID NO: 345 - DNA, 222 bp, Homo sapiens
ccatcatagaagcattaaggaaggagaggaatacatagatttgagatctatttgtaagtagaactaatgcatcttgctgagtgttgtatctgtaagactacaggaaggacgggaatcaaaaatggtttctgctggacgcggtggctcatgcctgtaatcccagcactttgggaggccgaggtgggcggatcacctgaggtcaggagtttgagagtagcctgg

SEQ ID NO: 346 - DNA, 516 bp, Homo sapiens
ctggggccactgtcggcatcatgattggagtgctggttggggttgctctgatatagcagccctggtgtagtttcttcatttcaggaagactgacagttgttttgcttcttccttaaagcatttgcaacagctacagtctaaaattgcttctttaccaaggatatttacagaaaagactctgaccagagatcgagaccatcctagccaacatcgtgaaaccccatctctactaaaaatacaaaaatgagctgggcttggtggcgcgcacctgtagtcccagttactcgggaggctgaggcaggagaatcgcttgaacccgggaggtggagattgcagtgagcccagatcgcaccactgcactccagtctggcaacagagcaagactccatctcaaaaagaaaagaaaagaagactctgacctgtactcttgaatacaagtttctgataccactgcactgtctgagaatttccaaaactttaatgaactaactgacagcttcatgaaactgtccacca

SEQ ID NO: 347 - DNA, 185 bp, Homo sapiens
aaaccaaattctaaccagcctatccccaggtagggggacgttggttatattctgttagagggggacggtcgtattttcctccctacccgccaagtcatcctttctactgcttttgaggccctccctcagctctctgtgggtaggggttacaattcacattccttattctgagaatttggccccag

SEQ ID NO: 348 - DNA, 293 bp, Homo sapiens
cttgaggctttcaggggttgtgacatcaaggctcaacctgtggatcagcaggacccaggaatctggagatcaggacccccaggaggcacagaaagcatcatctgcaaccgagaggactcagtggggacagaaatctgactcctcgctggacgctgaggtgtgacaagccccgccaagacagacctgcaagtcttcgtctcaagggacctccctcatgccaggcccctgcctctcacagcagcaccctttcctctcattgtccctgttccctttttgcctgtggatctgtttgg

SEQ ID NO: 349 - DNA, 567 bp, Homo sapiens
  misc_feature 563: n = A,T,C or G
ccaccatcatttaatgacattcaattaaggatttcttgaacaatttctaccaaaaaaataatttcctcctctaaaacattgataaaattgataactgggtacctaacagttgcaaaacatgtctacaccattctttagtatgaaaagcaacataaaaaaatggagcatcaaaatattttatttcaaatttattttatgccagatccaagctgtaactggaacctattcccagtctatgggtttctgaatttcattttcctatttattgtatttttatgagaaacttgttgtaatgagtctgtaccactttatttgacatttactaaagctgtataaaagccgtgcacagtttatttacagtattgtacattaaatgataatgtttgaagatcacacaaagatttcacaaaactataactaatacagaaagatgtgtgaaaacattaggggctttcaaaattttaggtatggaattttgcaaagattattttggcttataagtgttaggcaatcactaacctgaaataagtgacaaaaacatgcagatgattaccatttcaacnaatg

SEQ ID NO: 350 - DNA, 528 bp, Homo sapiens
cagagatcacgccactgcactccagcctgggcaacaagagtgaaactccgtttcaaaaaaaaaaaagaaattagacgttaaaaaaagatgtgacacatcatatcaaaattgtctacactacattaaaggagttaaaaatactgaaatgtagcaagacgaacttgtctcgagacagggtcttgctctgttgcccaggctggggtgcagtggcgccattatggctcactgcagtctcgacatcccgttctcacgcaatcctcctgcctctgcctcttgagtagctaggcctacagctatgtgccactacgcccagctaattttttgtatagatgaggttttgccttttttcctttctgtagagatgaggttttgccatgttcgccaggctggtctcgaactcctgacctcaagtaacccgcccacctcagcctcccaaagtgctgggataacaggtgtgagccaccaccacgcacagccaaaaatgccttttttttttttttgagacggagtctcgctctgtcatccagt

SEQ ID NO: 351 - DNA, 387 bp, Homo sapiens
  misc_feature 192: n = A,T,C or G
tttttttttttttttctggctctagagggggtagagggggtgttatagggtaaatacgggccctatttcaaagatttttaggggaattaattctaggacgatgggcatgaaactgtggtttgctccacagatttcagagcattgaccgtagtatacccccggtcgtgtagcggtgaaagtggtttggtttanacgtccgggaattgcatctgtttttaagcctaatgtggggacagctcatgagtgcaagacgtcttgtgatgtaattattatacgaatgggggcttcaatcgggagtactactcgattgtcaacgtcaaggagtcgcaggtcgcctggttctaggaataatgggggaagtatgtaggagttgaagattagtccgcc

SEQ ID NO: 352 - DNA, 471 bp, Homo sapiens
  misc_feature 465: n = A,T,C or G
aaacaatttgttaaaaaattttccgtcttatttcatttctgtaacagttgatatctggctgtcctttttataatgcagagtgagaactttccctaccgtgtttgataaatgttgtccaggttctattgccaagaatgtgttgtccaaaatgccgtttagtttttccttatttctcttgtcctttcgtacagggaggaatttgaagtagatagaaaccgacctggattactccggtctgaactcagatcacgtaggactttaatcgttgaacaaacgaacctttaatagcggctgcaccattgggatgtcctgatccaacatcgaggtcgtaaaccctattgttgatatggactctagaataggattgcgctgttatccctagggtaacttgttccgttggtcaagttattggatcaattgagtatagtagttcgctttgactggtgaagtcttagcatgtactgntcggag

SEQ ID NO: 353 - DNA, 309 bp, Homo sapiens
ctgaagatgatgaggatgacgatgtcgataccaagaagcagaaggccgacgaggatgactagacagcaaaaaaggaaaagttaaactaaaaaaaaaaggccgccgtgacctattcaccctccacttcccgtctcagaatctaaacgtggtcaccttcgagtagagaggcccgcccgcccaccgtgggcagtgccacccgcagatgacacgcgctctccaccacccaacccaaaccatgagaatttgcaacaggggaggaaaaaagaaccaaaacttccaaggccctgctttttttcttaaaagtacttt

SEQ ID NO: 354 - DNA, 321 bp, Homo sapiens
cggccgaggtctgttcagtatggcaaagggcagacttactccttcatccactctgctgccttgatgaggtgaacacactggaataagatggagggcaggatacctgccaaagcttgaggaatgagatgatctgaaacaattgggcaaaggctggacatttcaaaaagctgacttccaactgcagtttatgggtatagaatttgatgcttccctcaagtcctgactgctctttctgaggcagccaggctaggccaagaaatgagctgctccagcttctccagagcacagcagcctcccagggcctgtcagcatctgcagcag

SEQ ID NO: 355 - DNA, 357 bp, Homo sapiens
ccaaacttgcatttgcattttgcactcatgacgatgatgatgcccatggcgcacagaaccccagcgcagatgagcccgccaacctggaggctgtgccagtcatagtagaaaggactgtttttatcttctaggtcattggcgtccaggacaggaaagcctgccaggaacacaagcaggcccagggtcaccttctgcatgtcagagcgctggcctcttaagcctctttccaggggctcctccaagccacctctggcctgcaaggccccactatacccccttcccatgatgtcatccagccaagactgacagatggtatcctcctcgccccagcctctgtgtggttcaccaggctgagca

SEQ ID NO: 356 - DNA, 491 bp, Homo sapiens
  misc_feature 405, 406: n = A,T,C or G
cgccgccgcttgtgctgcagccatgtctctagtgatccctgaaaagttccagcatattttgcgagtactcaacaccaacatcgatgggcggcggaaaatagcctttgccatcactgccattaagggtgtgggccgaagatatgctcatgtggtgttgaggaaagcagacattgacctcaccaagagggcgggagaactcactgaggatgaggtggaacgtgtgatcaccattatgcagaatccacgccagtacaagatcccagactggttcttgaacagacagaaggatgtaaaggatggaaaatacagccaggtcctagccaatggtctggacaacaagctccgtgaagacctggagcgactgaagaagattcgggcccatagagggctgcgtcacttctgggnnccttcgtgtccgaggccagcacaccaagaccactggccgccgtggccgcaccgtgggtgtgtccaagaagaaataagtctgtagg

SEQ ID NO: 357 - DNA, 237 bp, Homo sapiens
ctgttgctgttattacagtccagcttagaagacaatacgtcaggaaatatgaaggagaagctgaggaacgaaagaaacttcgacaagagaatggaaatgtacatgctatagcataactgaagataaaattacaggatatcacattggagtcactgccaagtcatagtcataaatgatgagtcggtcctctttccagtggatcataagacaatggaccctttttgttatgatggtttt

SEQ ID NO: 358 - DNA, 434 bp, Homo sapiens
ctggggagggcagcaatctagcacgtttaccaggctcacagatggctctagcttgaatttgcgtgtgatggcacttagaacgcgtagctgggaggcccggtcctcatttgcccccacaaacaccagcttgtcaaatctgccaggccgcagaagggcagggtccaggagatctggtctgttggtggctccaatcacaaacacatcctgagtgctgtgcagcccatctagctcggcaaggagctgagacaccaccctgtccatcactcctccagaatctccacttcgcccccggcttggggccaaagagtccagttcatcaaagaagataatgcatggagctgcagccctggccctggcaaacacttcccgcacattctcctcactttggcccacatacatgttaatgagctctggccccttcacgctgaggaagg

SEQ ID NO: 359 - DNA, 219 bp, Homo sapiens; identical to SEQ ID NO: 307

SEQ ID NO: 360 - DNA, 361 bp, Homo sapiens
aaaatcctggataattatatacttaaagctcatgagcataaagctcacttgaccatgcagaaatgctgggaagcagggtgcatggcatgggaatacatctccctgatctttgagagagcctctctggatattctttcagagcatgagccaggatgtactgactactttcttcacacatcagttgccctttatgatctcagttcataaactctttgtggtatgtagcaatcaaaagtcatattacttctgtaaaactaacattatatagggtgtatagtcccagacaaattatatgaagctagatttttcttgccctggcccaatttatcattcctcctcctgcccacacctacctcccttt

SEQ ID NO: 361 - DNA, 497 bp, Homo sapiens
aaatacaggtttgtagggtggtattttgttttttccagctataaaaaaaggcccaaaagtgcatgtgtgaggggggaaaggcagaaattaagcaataaagtcattttccctggagggacatgagagggagaaaacaggaggcagtgctgggagaacgcactttcctcaccactgggcttcttgttattcttagtattggtccacaaaagttatattcacattctagctttgatgcctctttcctgggattaaatgagctgaaagacctctgtgaactgtagagaagaccaggggctcagcccagcccagcccagcccctcagggctctgtgctcttctagggatggatggttttggtaaagaacagacgcccagcagcccccggtcactcagcaccagtgtgacagtccctcctctctctgggggtgtgtaagaaaacggcccctatttttaggacaggaagagtagagggggggcctgcagcaagattccatgact

SEQ ID NO: 362 - DNA, 261 bp, Homo sapiens
aaagcttttagagaatacactacaccagggagtatgactactagtatgactattaggagggtaataccaagagttggactacgcaccttaggcaagatacaaaccaactaaaatagaataaagaatgagtcagatgagtgtagccattttaaccaagcagcacatttgttaatttctacaacttagtctcagcgatacccattgtatttagccatgttcaacaacaagtgtcagaaactgcacagactcctccctgttcag

SEQ ID NO: 363 - DNA, 232 bp, Homo sapiens
  misc_feature 46, 126, 132, 156, 225: n = A,T,C or G
gtacaagctttttttttttttttttttttttttttttttatggggngcgtgcaggtagaggcttactaaaagtgtgaaaacgtgggcttggattaaggcgacagcgatttctaggatagtcagtanaattanaattgtgaaaatgataaagtgtanagggaaggttaatggttgatattgctaggggggcgcttccaattaggtgcatgaataggtggcctgcantaatgtt

SEQ ID NO: 364 - DNA, 390 bp, Homo sapiens
ccaccatctatgcaaagtgaaagctctgaacaagggtgatgccaactctgaagtcactgtgtactaccagtcaggtaccaggagtctaagagaatatacgcttatggagctgcttgtgatgcacatggaagaaccttgttttgacttccttcgaaccaagcagacccttgggtaccatgtctaccctacctgtaggaacacatccgggattctaggattttctgtcactgtggggactcaggcaaccaaatacaattctgaagttgttgataagaagatagaagagtttctttctagctttgaggagaagattgagaacctcactgaagaggcattcaacacccaggtcacagctctcatcaagctgaaggagtgtgaggatacccacct

SEQ ID NO: 365 - DNA, 311 bp, Homo sapiens
ctgctgcagatgctgacaggccctgggaggctgctgtgctctggagaagctggagcagctcatttcttggcctagcctggctgcctcagaaagagcagtcaggacttgagggaagcatcaaattctatacccataaactgcagttggaagtcagctttttgaaatgtccagcctttgcccaattgtttcagatcatctcattcctcaggctttggcaggtatcctgccctccatcttattccagtgtgttcacctcatcaaggcagcagagtggatgaaggagtaagtctgccctttgccatactgaacag

SEQ ID NO: 366 - DNA, 611 bp, Homo sapiens
  misc_feature 522, 543, 582, 590, 597: n = A,T,C or G
aaaagatatttaagtttaatacaaattttatacaaagaaaatgtgaaaaaatacttccatatgctaaaagcaattatgcttcacaaataaggccagctaggctattttttttttttgacaactgcaattcacaaatgttctttctctcctgttttcttctaatactctcttatttcttctctaatatgggtaactagctggaaactgtacagttcgcatcctcttaacaatgaagagaaagtaaacaagactaaaatgtacaacaaaacgtactggaatgatatcgtacaattaattttctcatatacatacatcaccttttgctttttcatcaatgctttttgttttacacaacatacaaaatggctctacagcatacgtagtgtacggacagcatgacgggccttgctttctctcatactgcctgtgtttcatgcttacataaaaacgtgaaattccatcatataaataatacgtacatgcttcatcccagactcaaacgtcctctgcgtgcaccttgcntttgagtccttgcttccaagnagcacagcatctctgaccaagtgtgtgtgagtgtgtttntgtgctgngagctgngttcatgtatgtgc

SEQ ID NO: 367 - DNA, 316 bp, Homo sapiens
aaaatcagttacggcaattcacttaaggagcttgagggccgtgttaaaaggagccaggttttcacaagacctcatccacctctgcacattggctggcactgccacactgcagcctccgatctgctggagtacagaccacagcaccacgtctgctacggtgagttcattcccagcgagccaagggctcttcccaagagcagagttcatggagcggaaaacagcggctttttctttactgcttccctcttttaactgaaaaatcgcaatatctacccagctatctataagggttgcgttgacagcattatgcttctgg

SEQ ID NO: 368 - DNA, 304 bp, Homo sapiens
atcagcctctcttactgtactctccgggaatgttaacctttctattttcagcctgtgccacctgtctagacaagctggcttccccattggcccctgtgggtccacagcagcgtggctgccccccagggccaccgcttctttcttgatcctctttccttaacagtgacttgggcttgagtctggcaaggaaccttgcttttagcttcaccaccaaggagagaggttgacatgacctccccgccccctcaccaaggctgggaacagaggggatgtggtgagagccaggttcctctggccctctcca

SEQ ID NO: 369 - DNA, 423 bp, Homo sapiens
ccaggtgatcatttttctacaacggcatttctcaacctcggctgcatataaaattacctgggagctttctaaaaattctgaaatttggtcctaattctcagcagattctgacgtgattaatttggggtgagtgccaggtactgtttttttggtttttttttaatctccctaggtgattttaatgtgaaaccaagattgaagcctcagtctgaagaaaaatagattcatagaaaactctggcccctccccgggggcctgccctgctcgcctcaacatcttgtgctttttggcaagagagggctgaggagcctgctggtcgctctctgcctgggcccgggccctgtctctttggtatcagattctgagcaggggagggagctggaaggagatgcagcagaggaagccaaatgccctcaacaacac

SEQ ID NO: 370 - DNA, 506 bp, Homo sapiens
atttaactgtggggttggcgctgtccttgtggtatcaaaggagcagacagagcagattctgagggatatccagcagcacaaggaagaagcctgggtgattggcagtgtggttgtacgagctgaaggttccccacgtgtgaaagtcaagaatctgattgaaagcatacaaataaatgggtcagtgttgaagaatggctccctgacaaatcatttctcttttgaaaaaaaaaggccagagtggctgtcttaatatctggaacaggatcgaacctgcaagcacttatagacagtactcgggaaccaaatagctctgcacaaattgatattgttatctccaacaaagccgcagtagctgggttagataaagcggaaagagctggtattcccactagagtaattaatcataaactgtataaaaatcgtgtagaattttgacagtgcaattgacctagtccttgaagagttctccatagacatagtctgtcttgcaggattcatgagaattc

SEQ ID NO: 371 - DNA, 364 bp, Homo sapiens
cctttcatccctcgggtgtgctatggatggcttctaacaaaaactacacatatgtattcctgatcgccaacctttcccccaccagctaaggacatttcccagggttaatagggcctggtccctgggaggaaatttgaatgggtccattttgcccttccatagcctaatccctgggcattgctttccactgaggttgggggttggggtgtactagttacacatcttcaacagaccccctctagaaatttttcagatgcttctgggagacacccaaagggtgaagccatttatctgtagtaaactatttatctgtgtttttgaaatattaaaccctggatcagtcctttgatcagtataatttttt

SEQ ID NO: 372 - DNA, 272 bp, Homo sapiens
ctgggtccccccagcaggctccaccgctgagggtcctgacattagctgtcagcccctggcctgctcagactgcaaacggtcatacaaagtggtctagggaccagcaaaaataataaaccacccccataaacagacacatacacaaagtagatttgttacgcagtttacaagcatgttcccatcacacagcaagaccaggacaggtgattcagggtagcagataagggaagacaccaaaacacaggaattgaaaaggcaagacccccgtccac

SEQ ID NO: 373 - DNA, 462 bp, Homo sapiens
aaatgttttaggcaacctaagaacaaatgtaaaagtaaagatgcaggaaaaatgaattgcttggtattcattacttcatgtatatcaagcacagcagtaaaacaaaaacccatgtatttaacttttttttaggatttttgcttttgtgattttttttttgatacttgcctaacatgcatgtgctgtaaaaatagttaacagggaaataacttgagatgatggctagctttgtttaatgtcttatgaaattttcatgaacaatccaagcataattgttaagaacacgtgtattaaattcatgtaagtggaataaaagttttatgaatggacttttcaactactttctctacagcttttcatgtaaattagtcttggttctgaaacttctctaaaggaaattgtacattttttgaaatttattccttattccctcttggcagctaatgggctcttaccaagttt

SEQ ID NO: 374 - DNA, 506 bp, Homo sapiens
ttgttttgttacatagtgtgcaacaaattacaatattctgcagccacaaattatatgcagagtatgaagaaactattaatcagatagtgtaatctttccatttataactctacaaggaagaactagcaaatcagatcttacatataacatctcactaaactttatgcatggaaagtgacagacactgcttgtgctgtttgatacaaaatggctgaacttcatcttcagaagactaaacctgacatctaaacatgccaatataaacatcaaaacaaaatatattctaaccaaccacgggaaacagtctggtatcaggaaagcaacaaggattacacacattattttataaaccagcacacaaaggtttaaaacagttctgaaaatgaagttagctgtcttgagtcaagggaataaaaaaaaagtcagtattgaccatttacaatctctgacctttgtggagacggtaagaatctgttgtagtgcagctacatacagtacaattcagg

SEQ ID NO: 375 - DNA, 425 bp, Homo sapiens
cctggcggaaagaaggctctagaacctgcttatagagccacaacagggtgcagacaactgtgatgtcagccaatgtcactcgttcgcccaccagaaaagtcctcgtcttcaagtaagcatccagcagccctagaattcgcctcacttcctcctttgcattctcagtggcctgtttgttgtggtgcatgatgcccaaggtggggaacacccaggtactggctgggggcactatatcggaatcagcaaagctcacccactgcaccacctgggctgctgcctctggagtacttccccgcagctcctcattgctcacatagtaggcaatggcgttgctctcaaacacacagaatccatcatcaccctcaaatgctgggaccttgccggcaggaaatttgcggagaaattcaggggtgcggttggtttgg

SEQ ID NO: 376 - DNA, 417 bp, Homo sapiens
ctaatatttcactttacatccaaacatcactttggcttcgaagccaaagtgatgtttggatgtaaagtgaaatattagttggcggatgaagcagatagtgaggaaagttgagccaataatgacgtgaagtccgtggaagcctgtggctacaaaaaatgttgagccgtagatgccgtcggaaatggtgaagggagactcgaagtactctgaggcttgtaggagggtaaaatagagacccagtaaaattgtaataagcagtgcttgaattatttggtttcggttgttttctattagactatggtgagctcaggtgattgatactcctgatgcgagtaatacggatgtgtttaggagtgggacttctaggggatttagcggggtgatgcctgttgggggccagtgccctcctaattgggg

SEQ ID NO: 377 - DNA, 457 bp, Homo sapiens
  misc_feature 346, 419: n = A,T,C or G
cctgacattcctgccttcttgtactaataagaaaaataaaacaaaatagtgttgaagtattggggcggcgaaaattttggggagtggtatggagagagaatgggcaatgtttctcagggctgcttcaagcgggatcaggggcggcgtgggaacctagagtgggagagattaagctgaagggagatcttgtggtaaggggtgatattgtggggttgttagaagcaacatttgtcgtgtagaattattggtgatggcctggatatggttttgtatgaattgaaaaactaaatggaataagaaaaggagaaaaacaggtataaaaggactaagaattgggaggacctangacatctgattagagagtgcctaaggaggttcagcatagtcctgccagcaaagattatttatttacttcaagngtttagagtggcagtttggggatagcacgaggagatac

SEQ ID NO: 378 - DNA, 315 bp, Homo sapiens
ccaggaggcagtggaggaagtgggggttatggtgggaggagccgatactgagcttcttcctatttgccatgggcttcactgtataaataggagaggatgagagcccagaggtaacagaacagcttcaggttatcgaaataacaatgttaaggaaactcttatctcagtcatgcataaatatgcagtgatatggcagaagacaccagagcagatgcagagagccattttgtgaatggattggattatttaataacattaccttactgtggaggaaggattgtaaaaaaaaaatgcctttgagacagtttcttagct

SEQ ID NO: 379 - DNA, 552 bp, Homo sapiens
  misc_feature 399, 526: n = A,T,C or G
gcgagaatgaagactattctcagcaatcagactgtcgacattccagaaaatgtcgacattactctgaagggacgcacagttatcgtgaagggccccagaggaaccctgcggagggacttcaatcacatcaatgtagaactcagccttcttggaaagaaaaaaaagaggctccgggttgacaaatggtggggtaacagaaaggaactggctaccgttcggactatttgtagtcatgtacagaacatgatcaagggtgttacactgggcttccgttacaagatgaggtctgtgtatgctcacttccccatcaacgttgttatccaggagaatgggtctcttgttgaaatccgaaatttcttgggtgaaaaatacatccgcagggttcggatgagaccaggngttgcttgttcagtatctcaagcccagaaagatgaattaatccttgaaggaaatgacattgagcttgtttcaaattcagcggctttgattcagcaagccacaacagttaaaaacaaggatatcaggnaatttttggatggtatctatgtctct

SEQ ID NO: 380 - DNA, 139 bp, Homo sapiens
aaataactattcctcctccattccatcgactcccagcaccagccaggaggaccctcagttcagtgttcctcccactgccaacacacccacgcccgtttgcaagcggtccatgcgctggtccaacctgtttacatctgag

SEQ ID NO: 381 - DNA, 186 bp, Homo sapiens
ccaggcatggtggcacatgcctgtggtcccagctactcaggaggcggaggcgggagaaccccttgagccagggagttggaggttgcagtgagccgagatcgtgccacagcactctagcctggcaacagagcgagactccgtctccaaaaaaaaaaaaaaaagaagatagtttacacaacaccacag

SEQ ID NO: 382 - DNA, 403 bp, Homo sapiens
tttttttttttttttaagaccctcatcaatagatggagacatacagaaatagtcaaaccacatctacaaaatgccagtatcaggcggcggcttcgaagccaaagtgatgtttggatgtaaagtgaaatattagttggcggatgaagcagatagtgaggaaagttgagccaataatgacgtgaagtccgtggaagcctgtggctacaaaaaatgttgagccgtagatgccgtcggaaatggtgaagggagactcgaagtactctgaggcttgtaggagggtaaaatagagacccagtaaaattgtaataagcagtgcttgaattatttggtttcggttgttttctattagactatggtgagctcaggtgattgatactcctgatgcgagtaatacggatgtgtt

SEQ ID NO: 383 - DNA, 436 bp, Homo sapiens
ccacaactgtgaagttagaaaagccctgtcaaagcaagagatggctagtgctccatccagccaaagaggtcgaagtggttctggaaactttggtggtggtcgtggaggtggtttcggtgggaatgacaacttcggtcgtggaggaaacttcagtggtcgtggtggctttggtggcagccgtggtggtggtggatatggtggcagtggggatggctataatggatttggtaatgatggaagcaattttggaggtggtggaagctacaatgattttgggaattacaacaatcagtcttcaaattttggacccatgaagggaggaaattttggaggcagaagctctggcccctatggcggtggaggccaatactttgcaaaaccacgaaaccaaggtggctatggcggttccagcagcagcagtagctatggcagtggc

SEQ ID NO: 384 - DNA, 299 bp, Homo sapiens
ccattcttttatcttgggtccatgtgagtgacagaaatggtgcggcctgggaaagatctccctcctttacattttctcttctccctcctcctccttattctaaaactgtgcctccaacagaggggcaggggctcttgtagagagatccctggcccaggacaggagatgccaaatctaatttatctcactgagggcctttgagaaaaacgcttctgggccaggctcagtggctcatgcctatataatcccagtactttgagaagctgaggcggcagatcacttgaggccaggagttcgag

SEQ ID NO: 385 - DNA, 452 bp, Homo sapiens
ctaacctgttacactgggctgggttgggtagggtgttctggcttttttgtggggtttttatttttcctcagtccattgttccacgtttaagaactaggaataccaggactgatgcaattctactgggtcactatcgcttgtcacaagacacagacaatcagaccaaagtatttgctgtaataactaagaaaaaagaagaaaaaccacttgactataaatacagatattttcgtcgtgtccctgtacaagaagcagatcagagttttcatgtggggctacagctatgttccagtggtcaccagaggttcaacaaactcatctggatacatcattcttgtcacattacttacaaatcaactggtgagactgcagtcagtgcttttgagattgacaagatgtacacccccttgttcttcgccagagtaaggagctacacagctttctcagaaagg

SEQ ID NO: 386 - DNA, 482 bp, Homo sapiens
aaaactgtggcaccttatttcttttgaaatgtcactttataaggtgtatgtagaaagcaacagcagcagttacaaaatgttgtctgagtgattctgagagctcaaaacaaggatccgcgtataggctgaagaaaaagacgttcagttaacagtgcgcgctgtagaactttaacacaagtcttcaggtggaattcctgtgtaaaccttagtagagatgcgactcacggagaccaaaagtaaaaatctctttaccgtttacagtttagtgaggtggtctgcattctcgcaaacgacttacaaagtacaagaaatgttgcgtgtgagtattaggcatagaatatttcattttcttacggaaggagcagcaggggacaggaaacctagtggacgccccgccaccacctttcccgaagatgcacacccccaggaacggcagtgcaagcctggcagcaagccacccttacaattctttttggttgttt

SEQ ID NO: 387 - DNA, 517 bp, Homo sapiens
gaacctgctaaggctgcctcagacctgactgcctggttcagcctcttcgctgacctcgacccactctcaaatcctgatgctgttgggaaaaccgataaagaacacgaattgctcaatgcatgaatctgtacccttcgggagggcactcacatgccgcccccagcagctcccctgggggctagcagaagtataaagtgatcagtatgctgttttaataattatgtgccattttaataaaatgaaagggtcaacggccctgtttatattggtataattatttactcttatttggtataaagggttttcgtgtatctctatgtggatctaaataatacaggattgtctagaagcggtttccaggccaccgctctcctgcctacatcccatcatggctgctgcggtgtcactgggctaccgtgagatccaagttgaaatcagaagcctactttgatggtaggtttgaatgacgtgtcctacagcctcagaggcagcaggaggctagcaaagcttaaatgcc

SEQ ID NO: 388 - DNA, 544 bp, Homo sapiens
  misc_feature 468: n = A,T,C or G
ctgtttatgatcagcaagactggggaggccgagaccatcaccacccactacctgttcttcctgggcctctatcgtgctttgtatcttgtcaactggatctggcgcttctactttgagggcttctttgacctcattgctgtggtggccggcgtagtccagaccatcctatactgtgacttcttctacttgtacattacaaaagtactcaagggaaagaagctcagtttgccagcataagtgccaaagaccatcaccagcatctgtccttcagggtgctcggacagaattcttaccacagcaaaggcataagatgcttgatacggaaaatcagaaacttaactcttttgttgcagatagtcatcagtggctctgtaaaaacgcagaggaaaagagccagaaggtttctgtttaatgcatcttgccttatctttttttattactgtgtacaaagatttttttacacaaagnaacttaatgctgtattaataaattcagtgtgtagcttcaattgggatagttccaaaagtgaagattttgtgaggaa

SEQ ID NO: 389 - DNA, 542 bp, Homo sapiens
ctgacaagcccttgcgcctgcctctccaggatgtctacaaaattggtggtattggtactgttcctgttggccgagtggagactggtgttctcaaacccggtatggtggtcacctttgctccagtcaacgttacaacggaagtaaaatctgtcgaaatgcaccatgaagctttgagtgaagctcttcctggggacaatgtgggcttcaatgtcaagaatgtgtctgtcaaggatgttcgtcgtggcaacgttgctggtgacagcaaaaatgacccaccaatggaagcagtgttgcttgttcagtatctcaagcccagaaagatgaattaatccttgaaggaaatgacattgagcttgtttcaaattcagcggctttgattcagcaagccacaacagttaaaaacaaggatatcaggaaatttttggatggtatctatgtctctgaaaaaggaactgttcagcaggctgatgaataagatctaagagttacctggctacagaaagaagatgccagatgacacttaagacctacttgtgatattt

SEQ ID NO: 390 - DNA, 276 bp, Homo sapiens
ctgatgccagaaggaaagccgaaatgctacaaaatgaagcaaaaactcttttagctcaagcaaatagcaagctgcaactgctcaaagatttagaaagaaaatatgaagacaatcaaagatacttagaagataaagctcaagaattagcaagactggaaggagaagtccgttcactcctaaaggatataagccagaaagttgctgtgtatagcacatgcttgtaacagaggagaataaaaaatggctgaggtgaccaaggtaaaacaactacatttt

SEQ ID NO: 391 - DNA, 189 bp, Homo sapiens
ctgctggtggatcagatatacgagaacgccatgattgctgctggacttgttgacgaccctagggccatggtgggccgcttgaatgagctgcttgtcaaggccctggagcgacactgacagccagggggccagaaggactgacaccacagatgacagccccacctccttgagctttatttacctaaattt

SEQ ID NO: 392 - DNA, 395 bp, Homo sapiens
cggaaacaaggcagatggagtcctggtgggaacagatggaaggtactcttcgatggcggccagtttcaggtccagtgagcatgagaatgcctatgagaatgtgcccgaggaggaaggcaaggtccgcagcaccccgatgtaaccttctctgtggctccaaccccaagactcccaggcacatgggatggatgtccagtgctaccacccaagccccctccttctttgtgtggaatctgcaatagtgggctgactccctccagccccatgccggccctacccgcccttgaagtatagccagccaaggttggagctcagaccgtgtctaggttggggctcggctgtggccctggggtctcctgctcagctcagaagagccttctggagaggacagtcag

SEQ ID NO: 393 - DNA, 230 bp, Homo sapiens
ctgccaaggagaccctgttatgctgtggggactggctggggcatggcaggcggctctggcttcccacccttctgttctgagatgggggtggtgggcagtatctcatctttgggttccacaatgctcacgtggtcaggcaggggcttcttagggccaatcttaccagttgggtcccagggcagcatgatcttcaccttgatgcccagcacaccctgtctgagcaacacgtg

SEQ ID NO: 394 - DNA, 522 bp, Homo sapiens
ctgtggttttgccagtcacactgatgagtccaaaaaacctaaaggctcaaccagacctccagctcccagtgaaggttcccagtagctcagtgtggcaaaggcaggtttctgtcttccaacctgccatggttcccatgtttcccccaaagtttgcgtcttagaaacttaatccccagtgcggcagtgttgggacatgggtaggtcgggagggctctgccactgccattacaatgaggtaatatccttgtcacctgagagtggtttttgtgaaggccggtgtggggctcctcttgctggcttgctctctggctctctcgccctttccccttctgccttccaccatgggatgtcctagcaggaaggccctaagcagatacaggctgttgctgttggactttgcagcctccagaactgtaagaaatacatttcttttctttataaattacctactctgtggtattctgttacaggaacacaaaacagaccaagacaccaaccctgacctgctctgtccttcccttc

SEQ ID NO: 395 - DNA, 387 bp, Homo sapiens
ccgcctccgccgcgcgcctcctccgccgccgcggactccggcagctttatcgccagagtccctgaactctcgctttctttttaatcccctgcatcggatcaccggcgtgccccaccatgtcagacgcagccgtagacaccagctccgaaatcaccaccaaggacttaaaggagaagaaggaagttgtggaagaggcagaaaatggaagagacgcccctgctaacgggaatgctaatgaggaaaatggggagcaggaggctgacaatgaggtagacgaagaagaggaagaaggtggggaggaagaggaggaggaagaagaaggtgatggtgaggaagaggatggagatgaagatgaggaagctgagtcagctacgggcaagcgggcag

SEQ ID NO: 396 - DNA, 176 bp, Homo sapiens
cctatgaccttggccgcagggctattgcttatgccactcacagagacagctattctggaggcgttgtcaatatgtaccacatgaaggaagatggttgggtgaaagtagaaagtacagatgtcagtgacctgctgcaccagtaccgggaagccaatcaataatggtggtggtggcag

SEQ ID NO: 397 - DNA, 419 bp, Homo sapiens
ctgtggcctggccgctcccaatgctgggggcttggcttggtgccccatccccttcctgactgagctctatgaaggactcttaaaaaaataaaataaaatgcaagcaaagtgctttgaaaggagggaggacaccctattcctgctaaggggtagaggaagaaggtgaaggcggctaggtgcccataagaggaggctggcacaatcttcattcccgccagtgtgatttcagtctcaaaagatgagtatttggctgagaaatggaaggatactccaggctccctacggagttgtgctggggccatgctgagctgcccttgcaggcagccctgggtgctgggggcagacatgcaggacactgggaagagtcagaaccacaggtgggagggaatctcagagcccaggctccccactgagcttgg

SEQ ID NO: 398 - DNA, 478 bp, Homo sapiens
  misc_feature 466: n = A,T,C or G
aaattctttaattaaggcattggtcccaacggtgcacatagattaagggattttgcttccttctgaactagatcatttgttagaggcttcagaaaaagaaaattagcttgaaatctagtctgggaaattgggggcagggaatgaaaaagttggtctcttgtttctccacgatacacaggcttcccatctaaagtcatgcttaactaaaagggaaaaaaaatgaaccaagcaaaagtatatagagtagccgtgacatttgcattattttctagactttacatttgcctgcaacaggcataacatgaaactccagagggaatttggattgataggaatgttcacataaacaccagcagtggctaactgttacacaacattcaaagtattcgagagaactgcctggagacagagagcgagggtccacagacacattagcaccatactgataggtcatgcagcaggatgntccctcccgagt

SEQ ID NO: 399 - DNA, 298 bp, Homo sapiens
ctgggtggtcctgccctgcatccgagagggtgtcgggacactcatccagatggctctgagacagcagcagagctgacaaggaggccccacaagtgagattcctttggcttcaaggtcgcaagtcctgtccttgggcctcctggcctgctgagcctcccaccggctttaccctcagagattgctgcagaagcccgtgtgctggaatgggctgccacatttctaggaaggaacccgggggcacatgtagcctggttattcaatgttatcatagacgtgaatcacatcctcgtggttgctg

SEQ ID NO: 400 - DNA, 309 bp, Homo sapiens
aaagtacttttaagaaaaaaagcagggccttggaagttttggttcttttttcctcccctgttgcaaattctcatggtttgggttgggtggtggagagcgcgtgtcatctgcgggtggcactgcccacggtgggcgggcgggcctctctactcgaaggtgaccacgtttagattctgagacgggaagtggagggtgaataggtcacggcggccttttttttttagtttaacttttccttttttgctgtctagtcatcctcgtcggtcttctgcttcttggtatcgacatcgtcatcctcatcatcttcag

SEQ ID NO: 401 - DNA, 485 bp, Homo sapiens
tgactaagatggaagcgtttttggggtcgcggtccggactttgggcggggggtccggccccaggacagttttaccgcattccatccactcccgattccttcatggatccggcgtctgcactttacagaggtccaatcacgcggacccagaaccccatggtgaccgggacctcagtcctcggcgttaagttcgagggcggagtggtgattgccgcagacatgctgggatcctacggctccttggctcgtttccgcaacatctctcgcattatgcgagtcaacaacagtaccatgctgggtgcctctggcgactacgctgatttccagtatttgaagcaagttctcggccagatggtgattgatgaggagcttctgggagatggacacagctatagtcctagagctattcattcatggctgaccagggccatgtacagccggcgctcgaagatgaaccctttgtggaacaccatggtcatcggaggc

SEQ ID NO: 402 - DNA, 260 bp, Homo sapiens
ccgggcaggtaaagcttttagagaatacactacaccagggagtatgactactagtatgactattaggagggtaataccaagagttggactacgcaccttaggcaagatacaaaccaactaaaatagaataaagaatgagtcagatgagtgtagccattttaaccaagcagcacatttgttaatttctacaacttagtctcagcgatacccattgtatttagccatgttcaacaacaagtgtcagaaactgcacagactcc

SEQ ID NO: 403 - DNA, 76 bp, Homo sapiens
  misc_feature 7, 11, 18, 30, 31, 46, 47, 61, 62: n = A,T,C or G
ctggganatgncgagctnctctggcatctnnatggacacattcagnntcttgggcacccannctaagccgaatgtg

SEQ ID NO: 404 - DNA, 439 bp, Homo sapiens
aaaattataagatttacagtgccttgattatgcaaaatagcataatggaaattaaaccaaatcaataaaccaaagagaaagaaaacttaattttctctagtatccatacttaaaccatctttgtaagtatctgatgtcccaaccatgtcttatgtagaaagtataatcgtttcaaatgtttcacttgcaggtttaatttctcattttcaatttttatgaactgtaatgcaatttcaaatcctattatacctagtgtttatactgcaacagcagcaaatctcacatgtgtaatcaaatgtggaactggggcacagcttctagctgtagacagaaattatacactgcattcagtccaggagagtacattacattaaccagagcgtagagtttagtacacttattgcagggttggtatttctttccctctgatctgaatcag

SEQ ID NO: 405 - DNA, 365 bp, Homo sapiens
aaaaaaaattaattgctccaagttttcaggcccaggggaggctctcccattctcctccttcaatagtcccgtccaggaagggtgatcttgtggataaattcatcatacttcactttgccattgggttcgatatctgcttccctgaagagatcatccacttccttgtgggtgagcttctcccccagactcgtgagttttgaccgcaggtcggacgccatgacgtaacctttcttctccttgtccaccatcaacatggctagaagaatttctttctttgggtcttcttgttttatttgcatgtgcataatggtcagaaaagtggagaaatccagctctccatttccgtctatcccgtgggtctgcag

SEQ ID NO: 406 - DNA, 274 bp, Homo sapiens
ctggaagccttgttggcccctaagcctttgtttcatgctacagtactgaggggtatgtgtccccaatgcacagccacccgcacacaactcaatgagcttcctgggaaacactattcccccacctccaccttaggtggctgcctcagttttccaaccacaggaatcagtccctcagctcctgcctctagtctccaccccaaaagttcagtcgtctctgtcttggagggcactgtcggccccctcaggttgaagttcaacactcctcaatgagcag

SEQ ID NO: 407 - DNA, 440 bp, Homo sapiens
aaaaagacttgtgcacttgcccaggctcaaggatattaaaatctagcacataaagcccattactagaggtagaaatacaggcaatatactattacggcaacaaccatcaattacagttaagaatttttctgtaacaaccaaatggataatcaaatattgcaacaactcaagtattactgagcaaagtgcatttctacagtattcagtgctgctattcagttttctaacttaaaacagcctatgataactggcagcaaagaaggtccttgcaatagactgcctctgcttgagaacttatgatgtaattattgcatgctgctaatatactatctaaacattaaagatactcctaaaatatttgatggtagactatgattaagacattacactacaaaaaaaccttatgcagaaggaaatcctaactgacgtgcttctgcttt

SEQ ID NO: 408 - DNA, 266 bp, Homo sapiens
ctgcagcttttcaccacattttcaattactgaattgcatgttttttttccaccttgataacttagggtcagtagaaagctatttacttacatgttatagtcaatataactatactaaatgcccatttgtaattgaagaaactcacagacacagtatgaactatattatacaaaatcatgaccatgagtttcagtgagagattctgtctctctcttaaagcaagaaatatcccacagctcagatttacataagtagtgccgcctttt

SEQ ID NO: 409 - DNA, 516 bp, Homo sapiens
ccagctttattaccagattgtcatccagcttcccatgatcaacaatgttatgtactttcagatcaacaacaaaacgggagccatctctcttacccgagagggatctcaggaattgaatcctgctaagaatccttcctataatctggtgatctcagtgaaggacatgggaggccagagtgagaattccttcagtgataccacatctgtggatatcatagtgacagagaatatttggaaagcaccaaaacctgtggagatggtggaaaactcaactgatcctcaccccatcaaaatcactcaggtgcggtggaatgatcccggtgcacaatattccttagttgacaaagagaagctgccaagattcccattttcaattgaccaggaaggagatatttacgtgactcagcccttggaccgagaagaaaaggatgcagtgagtaaaagagaagagtttcacaggcgacaagacaaagtcctatgcccatctacagttgagagcaaaatggattttacttt

SEQ ID NO: 410 - DNA, 379 bp, Homo sapiens
cggcgccgcgcccatagccggacggggatctgagctggcaggatgaatgtgggggtggcacccagcgaagtaaaccccaacacccgagtgatgaatagccgaggcatctggctggcctacatcatcttggtaggattgctgcatatggttctactcagcatccccttcttcagcattcctgttgtctggaccctgaccaacgtcatccataacctggctacgtatgtcttccttcatacggtgaaagggacaccctttgagactcctgaccaaggaaaggctcggctactgacacactgggagcaaatggactatgggctccagtttacctcttcccgcaagttcctcagcatctctcctattgtgctctatctcctgg

SEQ ID NO: 411 - DNA, 576 bp, Homo sapiens
  misc_feature 534, 541: n = A,T,C or G
aaacattacccagcatcattgtttataatcagaaactctggtccttctgtctggtggcacttagagtcttttgtgccataatgcagcagtatggagggaggattttatggagaaatggggatagtcttcatgaccacaaataaataaaggaaaactaagctgcactgtgggttttgaaaaggttattatacttcttaacaattctttttttcagggacttttctagctgtatgactgttacttgaccttctttgaaaagcattcccaaaatgctctattttagatagtttaacattaaccaacataattttttttagatcgagtcagcataaatttctaagtcagcctctagtcgtggttcatctctttcacctgcattttatttggtgtttgtctgaagaaaggaaagaggaaagcaaatacgaattgtactatttgtaccaaatctttgggattcattggcaaataatttcagtgtggtgtattattaaatagaaaaaaaaaattttgtttcctaggttgaaggtctaattnatacgtntgacttatgatgaccatttatgcactttcaaatga

SEQ ID NO: 412 - DNA, 377 bp, Homo sapiens
  misc_feature 332: n = A,T,C or G
ccaaatgtgttacttgtgcaccaaagagttttttaaaaagagatttgcctacgggtgagcactgaagtatacattgtgccaatgtaattattgtcttggagaccttctagaacttgctaaatcatatagcaagaagagaatgagttcaggcccagtaaatctggtgagttaatttacatctgtgatactgccgtttttcccattaaatgtggttatggcaaagcattcttagggtaataaataaataaataaactttggacaatgcctttacttgtgccctatatacagaactattccatagaattttccaggatttcaagatactacacanagaaaaaaactgtaaagcaatttggtcctttccaaatttcagcag

SEQ ID NO: 413 - DNA, 584 bp, Homo sapiens
  misc_feature 557: n = A,T,C or G
aaaataattacccatctttcagtcaatacacagccaactcttgattatctatgagaaacgtaagtgacatttactctcaaacttcactctaacagaatcatccacctttgatacacttgtttgttttacatcccatgtacactacagcctatcaagacgaagttataacacaaatgttgtttcctctgacccatgctagaaacgtgtaaggaaatggagtgagcacattctgctagggctttgcggatgaccctacagtggacagtgggggcaggatagaactctggacatgagaaaagacaaatttcatgttcctccagaatcaggtcttacatgccttcgttattttgttatcacaaaattaaaaacctgaggcttagtcactattttatatagataatggagagttgactgtaatcatgttatgactttagctctttaacatgaaaaaattcacaagaaagcatatgataaaaagattaaaaagactgccatgacatctagaagcatttattttatgcaaaaaacttaaatatgattatgtgtacacataaagngcacacattacctatgctgaacaatgc

SEQ ID NO: 414 - DNA, 229 bp, Homo sapiens
ctggatggctcttatgttatcatctgtttccatcgtggcctggagttttccattcacactgaatgtacagaagaggccgttttcatagaatatgacacaatgaccctctcttgaagcctgaatgagttttggtttcaggcagttttcaggaccctccaaggtcctcaacaagtctccattcatggaatgtatgagacatggtccttcttgtgaaccactcaacaccagg

SEQ ID NO: 415 - DNA, 597 bp, Homo sapiens
  misc_feature 547, 549, 551: n = A,T,C or G
ctgagagcggaaaatggtcttctcatgactccttgttacactgcaaattttgttgcaccagaggttttaaaaagacaaggctatgatgctgcttgtgatatatggagtcttggtgtcctactctatacaatgcttaccggttacactccatttgcaaatggtcctgatgatacaccagaggaaatattggcacgaataggtagcggaaaattctcactcagtggtggttactggaattctgtttcagacacagcaaaggacctggtgtcaaagatgcttcatgtagaccctcatcagagactgactactgctcttgtgctcagacatccttggatcgtccactgggaccaactgccacaataccaactaaacagacaggatgcaccacatctagtaaagggtgccatggcagctacatattctgctttgaaccgtaatcagtcaccagttttggaaccagtaggccgctctactcttgctcagcggaaaggtattaaaaaaatcacctcaacagccctgtgaagtgacctcagtgagatatttggtncntngtgtaagctgatagcacaagttctggcgacaggtagcacgtatctg

SEQ ID NO: 416 - DNA, 318 bp, Homo sapiens
ctggatggggagtccttgagggaggaactttatcttcccacgcagggcccccagcacctaacacagtgctgacatctgtaattgctcaataaacatcaactgaatggatacatgaaaagaaaggaacaaagaggtgagaaggcagagggacagaagctgacccccaggggccccatcacagacccctggagaaccagtgtgaccagcacatgcttccgtggggaggatgggcaggggagaggggcactgcagaggaggctgggccaggggggaaccacacgtgttccagcacgtgcacctgcaggtctccatgcacag

SEQ ID NO: 417 - DNA, 541 bp, Homo sapiens
  misc_feature 464: n = A,T,C or G
ctgctgtggttgctcccattacaacgggctatacggtgaaaatcagtaattatggatgggatcagtcagataagtttgtgaaaatctacattaccttaactggagttcatcaagttcccactgagaatgtgcaggtgcatttcacagagaggtcatttgatcttttggtaaagaatctaaatgggaagagttactccatgattgtgaacaatctcttgaaacccatctctgtggaaggcagttcaaaaaaagtcaagactgatacagttcttatattgtgtagaaagaaagtggaaaacacaaggtgggattacctgacccaggttgaaaaggagtgcaaagaaaaagagaagccctcctatgacactgaaacagatcctagtgagggattgatgaatgttctaaagaaaatttatgaagatggagacgatgatatgaagcgaaccattaataaagcctgggtngaatcaagagagaagcaagccaaaggagacacggaattttgagactttaaagtcgttttgggaactgtgatgtgatg

SEQ ID NO: 418 - DNA, 294 bp, Homo sapiens; identical to SEQ ID NO: 292

SEQ ID NO: 419 - DNA, 419 bp, Homo sapiens
ccaattgaaacaaacagttctgagaccgttcttccaccactgattaagagtggggtggcaggtattagggataatattcatttagccttctgagctttctgggcagacttggtgaccttgccagctccagcagccttcttgtccactgctttgatgacacccaccgcaactgtctgtctcatatcacgaacagcaaagcgacccaaaggtggatagtctgagaagctctcaacacacatgggcttgccaggaaccatatcaacaatggcagcatcaccagacttcaagaatttagggccatcttccagctttttaccagaacggcgatcaatcttttccttcagctcagcaaacttgcatgcaatgtgagccgtgtggcaatccaatacaggggcatagccggcgcttatttggcctgg

SEQ ID NO: 420 - DNA, 118 bp, Homo sapiens
aaaggaacatacttgcctggagatagcctttgcgatatttaaatgtccgtggatacagaaatctctgcaggcaagttgctccagagcatattgcaggacaagcctgtaacgaatagtt

SEQ ID NO: 421 - DNA, 275 bp, Homo sapiens
ctgctcgatgggcttaaaccgccactcgtcagcctccagctcttctaccaaaccagctagtttttccatccgagcaacttgctgatcatgtttcacctgtttaagcgtggatgccacttgatagctaaaaacagattcgcagaggaatctctcagagccatcttctaacatctctccagctcctttggggtaggtgaaaagggctttccgtggtggggcaaggtctgagacactgaaaccagatccagtgacagaacttccactgaccccaccag

SEQ ID NO: 422 - DNA, 494 bp, Homo sapiens
ccttatttctcttgtcctttcgtacagggaggaatttgaagtagatagaaaccgacctggattactccggtctgaactcagatcacgtaggactttaatcgttgaacaaacgaacctttaatagcggctgcaccattgggatgtcctgatccaacatcgaggtcgtaaaccctattgttgatatggactctagaataggattgcgctgttatccctagggtaacttgttccgttggtcaagttattggatcaattgagtatagtagttcgctttgactggtgaagtcttagcatgtactgctcggaggttgggttctgctccgaggtcgccccaaccgaaatttttaatgcaggtttggtagtttaggacctgtgggtttgttaggtactgtttgcattaataaattaaagctccatagggtcttctcgtcttgctgtgttatgcccgcctcttcacgggcaggtcaatttcactggttaaaagtaagagacag

SEQ ID NO: 423 - DNA, 340 bp, Homo sapiens
caagaatttggtgtggacgttggccctgtttgctttttataaaccaaactctatctgaaatcccaacaaaaaaaatttaactccatatgtgttcctcttgttctaatcttgtcaaccagtgcaagtgaccgacaaaattccagttatttatttccaaaatgtttggaaacagtataatttgacaaagaaaaatgatacttctctttttttgctgttccaccaaatacaattcaaatgctttttgttttatttttttaccaattccaatttcaaaatgtctcaatggtgctataataaataaacttcaacactctttatgataacaaaaaaaaaaaaaaaa

SEQ ID NO: 424 - DNA, 444 bp, Homo sapiens
caaatctctttttttaggttttgtccatagcatcagttgatccttactaagtttttcatgggagacttccttcatcacatcttatgttgaaatcactttctgtagtcaaagtataccaaaaccaatttatctgaactaaattctaaagtatggttatacaaaccatatacatctggttaccaaacataaatgctgaacattccatattattatagttaatgtcttaatccagcttgcaagtgaatggaaaaaaaaataagcttcaaactaggtattctgggaatgatgtaatgctctgaatttagtatgatataaagaaaacttttttgtgctaaaaatactttttaaaatcaattttgttgattgtagtaatttctatttgcactgtgcctttcaactccagaaacattctgaagatgtacttggatttaattaaaaagttca

SEQ ID NO: 425 - DNA, 361 bp, Homo sapiens
ccagcgcgcgaggaccgccgaacagccgcgtctctcggtccgccctggaaaatctcttcttcctcaggagtcagcttggctcccttcttgcggcccaggggcagcgcatagtgggactcgtaccactgtcggtacggtgtgctgtcgatgagcacgatgcaattcttcaccagggtcttggtacgaaccagctcgttattagatgcattgtagacaacatcgatgatccttgttttacgagtacaacactctgagccccaggagaaattccccacgtccaacctcagggcacggtatttcttgttacctccccgcacacggactgtgtggatgcggcgggggccaatcttggtgttggcag

SEQ ID NO: 426 - DNA, 440 bp, Homo sapiens
gccaaacaatacccacttgtcacgccaaatgaagagagaaatgtcatggaagagggaaaagactttcagccctcaagatctacagctcaacaggaacttgatgggaaacctgcttctcctactccggttattgtggcctcccacacagccaacaaagaagaaaagagtttactcgaactagaagtagatttggataatttggaattagaagatattgacacaacagatatcaatctggatgaagatattttggatgattgactgtaatgctttccatttacctgactaaacagatcattattatatataggtattgattgctaccctgaccacagtgctttggactatgagaaacttcttagatttttatatgtaaatgctgtggaccactgggagcacaatgcccacatcatcttaagaagagtttatgtgcagcattt

SEQ ID NO: 427 - DNA, 608 bp, Homo sapiens
ccacaaaacaccaaagaattgtaggcagtggcccctattgagaagttttccggtagagttggaaatcagttgtgaatacattctttgctagttggagtgcttgtttactaagcatgtgccgtcgtaggtattagtgctagtctcaaataggtgcttcccctgaggtgcaggggaagaccaaagtttgcaactcgaactgctttcgtccatgtttctcacattgctgtattttagaaaataggggttaagactgataacaaccttttacattgtgactgtgtttgcattgtctaatgacagataaatccttaacatttctctccaccttagtactttagactaattgtgtttgtccgtccatgccatgaatgagtgggctgtagttgggcctaaataaatgagctgttggaagaaaagaatcacagtactttccagcagtcagtccctggttcctagatgtgttctaagcaatgcaaatgtctaattgtcccccagtgggcatagtcagtgtcgtttatattgtagcagttacagctctgtagtttatgatgcaaatctgccaagagagatgtatgtgtcactgcatggcttctgaaagcaggatgaat

SEQ ID NO: 428 - DNA, 299 bp, Homo sapiens
  misc_feature 298: n = A,T,C or G
gtttttctcattttggatttctccaaaactaactgaatttaagcttcaggtccctttgtatgcagtagaaaggaattattaaaaacaccaccaaagaaaataaatatatcctacttgaaatttactctatggacttacccactgctagaataaatgtatcaaatcttatttgtaaattctcaattttgatatatatatgtatatatgcatatacatatccacacttgtctgcaagaatattgattaaaattgctaaatttgtacttgttcatcaaaaaaaaaaaaaaaaaaaaaaaanc

SEQ ID NO: 429 - DNA, 574 bp, Homo sapiens
  misc_feature 502, 551: n = A,T,C or G
ctgcaccatgccatctatagagataggaacggtgggtggtgggaccaacctactacctcagcaagcctgtttgcagatgctaggtgttcaaggagcatgcaaagataatcctggggaaaatgcccggcagcttgcccgaattgtgtgtgggaccgtaatggctggggaattgtcacttatggcagcattggcagcaggacatcttgtcaaaagtcacatgattcacaacaggtcgaagatcaatttacaagacctccaaggagcttgcaccaagaagacagcctgaatagcccgacagttctgaactggaacatgggcattgggttctaaaggactaacataaaatctgtgaattaaaaaagctcaatgcattgtcttgtggaggatgaatagatgtgatcactgagacagccacttggtttttggctctttcagagaggtctcaggttctttccatgcagactcctcagatctgaacacagtttagtgctttacatgctgngttctttgaagagatttcaacaagaatattgtatgttaaagcatcaganatggtaatctacagctcacctct

SEQ ID NO: 430 - DNA, 181 bp, Homo sapiens
aaactagaggaaagctacgacatggagagtgtcctacgcaacctgggcatgactgatgccttcgagctgggcaaggcagacttctctggaatgtcccagacagacctgtctctgtccaaggtcgtgcacaagtcttttgtggaggtcaatgaggaaggcacggaggctgcagccgccacag

SEQ ID NO: 431 - DNA, 591 bp, Homo sapiens
  misc_feature 527: n = A,T,C or G
ctgtcctggttgccctcggtgcagctccgagctccagttacaaggaattccaagttctcaggatcttgaagactctggaggccagtaatccctggatcacactgcttctaccagctcagaagagaagtcctgcctaaggtcatgaaataaacctgactgctgccaccagaccgaacagaggcaaagaacaccttgtcattgcgttcacacaagaattttagtctttgagcccttttgtgcatgaacacaccatccaagtgaccagtttccacagatcggatctctatggccttctctccccagcccattgtctgattggatcgaatatatgctactgatgtaggcatctctccccactgtagaactacatccttggtgatccttccatatgtgtttacataaaccccctcatcttcatagcacaccagaagctccattccatctgtattggggaggatgatgattgcatggggtttgatgctacactggatatgtgttggtagataaatgtcatagactgatcctgnatccacatcaacagcatggaatccagcacaggatccatagatcactttcaacctctggccttcc

SEQ ID NO: 432 - DNA, 548 bp, Homo sapiens
  misc_feature 537: n = A,T,C or G
cctttctgaggcagcagcaagcagctccaaacctccgaaagcttatttatgggacagtgacagaagataatgaagaagaagatgatgatactctagaagagcttggagggttgtttcgtgtcaaccagcctgacagagagtgtaagcacaaggctgactctttggactgctccagatttcttgtggaggccccccatgactgggatttagaggaggttatgaacagtatcagagattgcttcgtgactggaaagtgggaagatgataaagatgcagccaaggtcttagcagaagatgaggagctctacggtgactttgaagacttggaaacaggggacgtgcacaagggaaaatcaggccccaatactcagaatgaagatatagagaaagaagttaaggaagaaattgaccctgacgaagaagaaagtgccaagaaaaagcatttggataagaagagaaaattgaaggagatgtttgatgcagaatatgatgaaggagaaagcacatattttgatgatcttaaaggagaaatgcagnaacaagcacag

SEQ ID NO: 433 - DNA, 492 bp, Homo sapiens
caatgccagtaaacttaaattacgtaacttcttgcaaccacgaaacctgtaatacgctgtacagtaacaagtgttggcattatcagttgaactgtaaatacaaaatgcttcttccaattagtctctatgatgattaagtttctaaaatttatctgaacaccattcagaaacttgttttggggaatttgatagttattgatgtgcatctgttaaactgatgacagacataactcatcattccccagaaaccttttttgattacagtatctaacattttgcctcctcttttttggttttgctggttataaaggtttggattggagagggctcactggatcccaatccttggagctggatcattggattcaaatcataatgtggataggatagggaggatgaattaccaggattcatggagcgggatcagattaccaggaacataggagtggattcctgccccaaccaaaccgcattcgtgtggatttttttatt

SEQ ID NO: 434 - DNA, 493 bp, Homo sapiens
ccatctgatctataaatgcggtggcatcgacaaaagaaccattgaaaaatttgagaaggaggctgctgagatgggaaagggctccttcaagtatgcctgggtcttggataaactgaaagctgagcgtgaacgtggtatcaccattgatatctccttgtggaaatttgagaccagcaagtactatgtgactatcattgatgcccaggacacagagactttatcaaaaacatgattacagggacatctcaggctgactgtgctgtcctgattgttgctgctggtgttggtgaatttgaagctggtatctccaagaatgggcagacccgagagcatgcccttctggcttacacactgggtgtgaaacaactaattgtcggtgttaacaaaatggattccactgagccaccctacagccagaagagatatgaggaaattgttaaggaagtcagcacttacattaagaaaattggctacaaccccgacacagtagcat

SEQ ID NO: 435 - DNA, 476 bp, Homo sapiens
ctgcagcctgggactgaccgggaggctctgattatttacccaccacaggtaggttgtgttctgaatctcaggttcacaggttaaggctacagcatcctcatcctccacggggttggagttgttgctggtgatgaagggtttgggtggctctgcatagactgtgatcgtcgtgactgtggtcctattgaggccagtgtctgagttatgggcttggcacgtataggatccactattattcacagtgatgttggggataaagagctcttgggtggattgctggaaagtcccattgacaaaccaagagtactgtgcaggtgggttagaggctgcgtggcaggagaggttcagattttcccctgatctgtaagatgtgtttagaggggaaatggtgggggcatccgggccatagaggacattcaggatgactgaatcactgcgcctggcactcactgggttctgggtttcacatttgtagc

SEQ ID NO: 436 - DNA, 300 bp, Homo sapiens
aaaacttaaggggaaagttggagattgagcataagggcccttgagtaagactgtgtcttatgctttcctttatccctctgtatacaggagacagaccaactagaagatgagaagtctgctttgcagaccgagattgccaacctgctgaaggagaaggaaaaactatagagttcatcctggcagctcaccgacctgcctgcaagatccctgatgacctgggcttcccagaagagatgtctgtggcttcccttgatctgactgggggcctgccagaggttgccaccccggagtctgaggagg

SEQ ID NO: 437 - DNA, 345 bp, Homo sapiens
ccaatgtggttggtcttcagcttgcagttagccaggttccataccttgaccagcttgtcccagccacaggagacgatgatagggttgctgctgttgggcgagaagcggacacaagacacccactctgagtggctctcatcctggacagtgtatttgcacacacccagggtattccatagcttgatggttttatctcgagatccagagacaatctgccggttgtcagaggagaaggccacactcagcacatccttggtatggcccacaaatcgcctcgtggtggtgcccgttgtgagatcccagaggcgcagggttccatcccaggagcctgagagggcaaactgg

SEQ ID NO: 438 - DNA, 512 bp, Homo sapiens
aaatgccatgatccaggatggattttagatcttgttgaaagcagccacatccatggactgcacatagtcctcaaaagcagtgatctgctcctccagcatatctgttccaactttatcatcttcaactacacactgtatttgaagtttcttaattccgtatcccactggaactagtttagatgagccccagactaagccgtctgcttgaatgcttctgacgcactcctctaatttcgccatatctgtctcatcatcccaaggtttcacatctagtaagatggaagacttggcaacaagtgcaggttttttggctttctttgattcatattgtgcaagacgttcttcccttagcctctttgcttcttcacttcctcctcatcatcagatccaaagaggtcaatgtcatcatcatctttactatctgtagctccacttcctgtagtgtcttccacatcggcaggaccatatttgcccaaagctttcttcactcctggcaggcttgaaaaacattt

SEQ ID NO: 439 - DNA, 483 bp, Homo sapiens
ccacagcccatgcgaaggcccgcatgagcaagactgtggacctgcaggatgcagaggaagctgtggagttggtccagtatgcttactttaagaaggttctggagaaggagaagaaacgtaagaagcgaagtgaggatgaatcagagacagaagatgaagaggagaaaagccaagaggaccaggagcagaagaggaagagaaggaagactcgccagccagatgccaaagatggggattcatacgacccctatgacttcagtgacacagaggaggaaatgcctcaagtacacactccaaagacggcagactcacaggagaccaaggaatcccagaaagtggagttgagtgaatccaggttgaaggcattcaaggtggccctcttggatgtgttccgggaagctcatgcgcagtcaatcggcatgaatcgcctcacagaatccatcaaccgggacagcgaagagcccttctcttcagttgagatcc

SEQ ID NO: 440 - DNA, 580 bp, Homo sapiens
  misc_feature 560: n = A,T,C or G
ccgggcaggtccaggttttagatattaacctggctgcagagccaaaagtgaaccgaggaaaagcaggtgtgaaacgatctgcagcggagatgtacggctcctcttttgacttggactatgactttcaacgggactattatgataggatgtacagttacccagcacgtgtacctcctcctcctcctattgctcgggctgtagtgccctcgaaacgtcagcgtgtatcaggaaacacttcacgaaggggcaaaagtggcttcaattctaagagtggacagcggggatcttccaagtctggaaagttgaaaggagatgaccttcaggccattaagaaggagctgacccagataaaacaaaaagtggattctctcctggaaaacctggaaaaaattgaaaaggaacagagcaaacaagcagtagagatgaagaatgataagtcagaagaggagcagagcagcagctccgtgaagaaagatgagactaatgtgaagatggagtctgaggggggtgcagatgactctgctgaggagggggacctactggatgatgatgataattgnagatcgggggggatgaccag

SEQ ID NO: 441 - DNA, 528 bp, Homo sapiens
  misc_feature 480: n = A,T,C or G
gtaaattaaattgtgtactgaagggaaaagtttgatcataccaaacatttcctaaactctctagttagatatctgacttgggagtattaaaaattgggtctatgacatattgtccaaaaggaatgctgttcttaaagcattatttacagtaggaactggggagtaaatctgttccctacagtttgctgctgagctggaagctgtgggggaaggagttgacaggtgggcccagtgaacttttccagtaaatgaagcaagcactgaataaaaacctcctgaactgggaacaaaaatctacaggcaagcaagatgcccacacaacaggcttattttctgtgaaggaaccaactgatctcccccacccttggattagagttcctgctctaccttacccacagataacacatgttgtttctacttgtaaatgtaaagtctttacctgcccgggcggccgcccgggcaggttggaggtggaggggnagatggtcagtaggacagaaggtaacattgatgactcgctcattggtg

SEQ ID NO: 442 - DNA, 364 bp, Homo sapiens
cgatggaggaggaggaggttgagacgttcgcctttcaggcagaaattgcccagttgatgtcattgatcatcaatactttctactcgaacaaagagatctttctgagagagctcatttcaaattcatcagatgcattggacaaaatccggtatgaaagcttgacagatcccagtaaattagactctgggaaagagctgcatattaaccttataccgaacaaacaagatcgaactctcactattgtggatactggaattggaatgaccaaggctgacttgatcaataaccttggtactatcgccaagtctgggaccaaagcgttcatggaagctttgcaggctggtgcagatatctctatgattgg

SEQ ID NO: 443 - DNA, 589 bp, Homo sapiens
  misc_feature 541: n = A,T,C or G
ctgcctttgaagcacctcctcagtacgttttgccaacctatgaaatggccgtgaaaatgcctgaaaaagaaccaccacctccttacttacctgcctgaagaaattctgcctttgacaataaatcctataccagctttttgtttgtttatgttacagaatgctgcaattcagggctcttcaaacttgtttgatataaaatatgttgtcttttgtttaagcatttattttcaaacactaaggagctttttgacatctgttaaacgtctttttgtttttttgttaagtcttttacattttaatagtttttgaagacaatctaggttaagcaagagcaaagtgccattgtttgcctttaattggggggtgggaagggaaagagggtacttgccacatagtttcctttttaactgcactttctttatataatcgtttgcattttgttacttgctaccctgagtactttcaggaagactgacttaaatattcggggtgagtaagtagttgggtataagatctgaacttttcatctgcagaggcaagnaaaaatatttgacattgtgacttgactgtggaagatgatggttgcatg

SEQ ID NO: 444 - DNA, 510 bp, Homo sapiens
cctcatctcagagctgggtgccaggctgaaggatcactgaggaaggggaagtgggcaaagcagaccctcaaactgacacaagacctacagagaaaaccctttgccaaatctgctctcagcaagtggacagtgataccgtttacagcttaacacctttgtgaatcccacgccattttcctaacccagcagagactgttaatggccccttaccctgggtgaagcacttacccttggaacagaactctaaaaagtatgcaaaatcttccttgtacagggtggtgagccgcctgccagtggaggacagcacccctcagcaccacccaccctcattcagagcacaccgtgagcccccgtcggccattctgtggtgttttaatattgcgatggtttatgggacgttttaagtgttgttcttgtgtttgttttcctttgactttctgagtttttcacatgcattaacttgcggtatttttctgttaaaatgttaaccgtccttcccctagcaaattt

SEQ ID NO: 445 - DNA, 326 bp, Homo sapiens
gaagacatctttgaaggtcatgagtttgttagtttaacatcatatatttgtaatagtgaaacctgtactcaaaatataagcagcttgaaactggctttaccaatcttgaaatttgaccacaagtgtcttatatatgcagatctaatgtaaaatccagaacttggactccatcgttaaaattatttatgtgtaacattcaaatgtgtgcattaaatatgcttccacagtaaaatctgaaaaactgatttgtgattgaaagctgcctttctatttacttgagtcttgtacatacatacttttttatgagctatgaaataaaacatttt

SEQ ID NO: 446 - DNA, 494 bp, Homo sapiens
ccaaatggtgaaaccctatctctactaaaaatataaatattagccttgtgtgggggcgcacacgtgtagtctcagccactagggaggctgaggcaggagaatcacttgaacccaggaggcggaggttgcagcgagccaagatcgtgccattgcacttcagcttgggtgacagagcaagactctgtctcaaaaaaaaaacaaagtcttatgacctctttggcatgtactttagagaggaaatcttacccaagccagaaagtctcagtctaggcattttttttattgtgcaagcatataaaattctagtaattctggggctaatcctgtgatagggagaattcaaggaaaggtggtggtgacccagtgctgccgttttctccttaggtgacgcatccaaagaagacattgacactgctatgaaattaggagccggttaccccatgggcccatttgagcttctagattatgtcggactggatactacgaagttcatc

SEQ ID NO: 447 - DNA, 322 bp, Homo sapiens
ctgactaagagccctctggcacaaatggaagaagaaagaagggagcatgtagctaaaatgaagaagatggagatggagatggagcaggtgtttgagatgaaggtcaaagaaaaagttcaaaaactgaaggactctgaagctgagctccagcggcgccatgagcaaatgaaaaagaatttggaagcacagcacaaagaattggaggaaaaacgtcgtcagttcgaggatgagaaagcaaactgggaagctcaacaacgtattttagaacaacagaactcttcaagaaccttggaaaagaacaagaagaaagggaagatctttt

SEQ ID NO: 448 - DNA, 237 bp, Homo sapiens
ctgcattgttgtggaattcacaactactcagactgggaaaatacagattggttcaaagaaaccaaaaaccagagtgtccctcttagctgctgcagagagactgccagcaattgtaatggcagcctggcccacccttccgacctctatgctgaggggtgtgaggctctagttgtgaagaagctacaagaaatcatgatgcatgtgatctgggccgcactggcatttgcagctattcag

SEQ ID NO: 449 - DNA, 339 bp, Homo sapiens
aggacgacaagaagaagaaggacgctggaaagtcggccaagaaagacaaaggcccagtggacaaatccgggggcaaggccaaaaagaagaagtggtccaaaggcaaagttcgggacaagctcaataacttagtcttgtttgacaaagctacctatgataaactctgtaaggaagttcccaactataaacttataaccccagggcaacagggaggaccagatcaacaggcttattagaagaatgaactaaggtgtctaccatgattatttttctaagctggttggttaataaacagtacctgctctcaaattgaaaaaaaaaaaaaaaaaaaaaaaaaaa

SEQ ID NO: 450 - DNA, 509 bp, Homo sapiens
  misc_feature 501: n = A,T,C or G
gtgagacacaggtatgtatttttgggtctcacaggttaaggtctgagccactgaggtcaggctctggtttgtatcccaagaccgagaagctgtgttaagcatggtgggtagagtttgtcaggtgacatctatgaaaccaggagcatgcaaagataggttgaccggaacagccatggtcaaaccaattaaactgtcctgcagttgaggtcaggcacaggtagaacggatctatcaggtgaggcccaaggagtccggattaggctcatctagaaagacctggatgtggtagatgacctctgaggatatgaagtgaaggcaggtggatagagccaggtctctcaggaggtctgaggagctgggatctggcacagtgagcaggtctggatttcccaggtggtgtcaagacagatgggtaggccaggcacagtggctcacacctataatcccagcaattttggaaggccaaggcaggcagatcagttgaagtcaagagctcgagancagcctgg

SEQ ID NO: 451 - DNA, 229 bp, Homo sapiens
  misc_feature 63, 166: n = A,T,C or G
aaaaaaggaattctgtgtcaagtataactcaaaataaatacaaattcacaagtagaactattnaatacttcatatggggtaaacaccattatctcccaactagatcgctagatctaccaactgcaagcgattgtcccttttgaacgtactaaaaccacacactttnccatcccctgggctcctggccctctgagcactcaattctcaatggcacctggcctgcatggca

SEQ ID NO: 452 - DNA, 595 bp, Homo sapiens
aaagaacaaactcaacatatcagcagcaaatttcagttaaactaaattggaaaccaatgttctgtgtaaccaaagtgcaaagtcagttccccagctcagaaagaaaattaagagtataaactgaaggcttaagagaacttcagagagcacactgtgtgattaatacataaatattaaaaattatccaatttttgatttaagaacaacacagtttggatctagtcattaaaacatatgcacaggtgtcaaaggcaagtaacactaccacctaaggttattcggaggaactgtgaagatgtagcacggacctctaaggtgtctaaaatcccttctgatggaaaggttatggaacactatctgccaaaaacactgaaagcaccacttttatatttagatccaatgctgagtgatatagtcactgttgggataggtttttatttgggaaaatggagaggattctcaaaacagattcatggcttgcatgcagtgacaccctatcaagagcctggaaagacaccatgaaatcacctcaactcaagtggtgggcccacctactcatagtcagtgttacactagccagctctagggctctgac

SEQ ID NO: 453 - DNA, 299 bp, Homo sapiens
aaaggccaagaaggcagtgttgaaaggtgtccacagccacaaaaagaagaagatccgcacgtcacccaccttccggcggccgaagacactgcgactccggagacagcccaaatatcctcggaagagcgctcccaggagaaacaagcttgaccactatgctatcatcaagtttccgctgaccactgagtctgccatgaagaagatagaagacaacaacacacttgtgttcattgtggatgttaaagccaacaagcaccagattaaacaggctgtgaagaagctgtatgacattgatgtgg

SEQ ID NO: 454 - DNA, 510 bp, Homo sapiens
  misc_feature 414: n = A,T,C or G
aaaaaggatttaggccactgcctttttctgagggaggagcggccagcatgtgccccgcggctcactgggcctgtctaatcacacagcagtggcaaaaggagtatctgccagacgcttcctatcactctattctgtctcctcatccacctgaagttcactccgtttccccaatgacttagaatggctttgtgcttagttttaattgtagtttgtgctattctgtgaattaacaattcaaacaaaataagaaagccatgttgttaaacagtagaggagccagggactctgtctccattctctcatcacacacaagtcatgcatctaccaaaaaaaaaaaaaacaaaaaaacacaacaacaaaaaaactgtcctctgaggaggcacaggtgtgacagataaggaacctgcagctcanattcaacaggcacctgccaagtccacactcaggactgtgacagcctcaacaacatgaggtccagacacattcactgtggaaggctctgcccacgcg

SEQ ID NO: 455 - DNA, 309 bp, Homo sapiens; identical to SEQ ID NO: 400

SEQ ID NO: 456 - DNA, 485 bp, Homo sapiens
gtggttgtgtggtcgtgtctcggaaaccggtagcgcttgcagcatggctgaccaactgactgaagagcagattgcagaattcaaagaagctttttcactatttgacaaagatggtgatggaactataacaacaaaggaattgggaactgtaatgagatctcttgggcagaatcccacagaagcagagttacaggacatgattaatgaagtagatgctgatggtaatggcacaattgacttccctgaatttctgacaatgatggcaagaaaaatgaaagacacagacagtgaagaagaaattagagaagcattccgtgtgtttgataaggatggcaatggctatattagtgctgcagaacttcgccatgtgatgacaaaccttggagagaagttaacagatgaagaagttgatgaaatgatcagggaagcagatattgatggtgatggtcaagtaaactatgaagagtttgtacaaatgatgacag

SEQ ID NO: 457 - DNA, 311 bp, Homo sapiens
ccacagggacctctgcagtgccccctaagtgacccggacacttccgagggggtcatcaccgcctgtgtatataacgtttccggtattactctgctacacgtagccttttacttttggggttttgtttttgttctgaactttcctgttaccttttcagggctgacgtcacatgtaggtggcgtgtatgagtggagacgggcctgggtcttggggactggagggcaggggtccttctgccctggggtcccagggtgctctgcctgctcagccaggcctctcctgggagccactcgcccagagactcagcttgg

SEQ ID NO: 458 - DNA, 659 bp, Homo sapiens
  misc_feature 537, 573, 576, 637, 646: n = A,T,C or G
aaatatcacaagtaggtcttaagtgtcatctggcatcttctttctgtagccaggtaactcttagatcttattcatcagcctgctgaacagttcctttttcagagacatagataccatccaaaaatttcctgatatccttgtttttaactgttgtggcttgctgaatcaaagccgctgaatttgaaacaagctcaatgtcatttccttcaaggattaattcatctttctgggcttgagatactgaacaagcaacacctggtctcatccgaaccctgcggatgtatttttcacccaagaaatttcggatttcaacaagagacccattctcctggataacaacgttgatggggaagtgagcatacacagacctcatcttgtaacggaagcccagtgtaacacccttgatcatgttctgtacatgactacaaatagtccgaacggtagccagttcctttctgttaccccaccatttgtcaacccggagcctcttttttttctttccaagaaggctgagttctacattgatgtgattgaagnccctccgcagggttcctctgggggcccttcacgatnacntgtgcgtcccttcagagtaatgtcgacattttctgggaatgtcgacagtctgattgctganaatagtctncattctcgacctc

SEQ ID NO: 459 - DNA, 461 bp, Homo sapiens
cctccctgggaagtggagggggccaggccacgaccaggcagaaatccaccaaaacaggagggccaccgacatacaaacgcaggacacagaaacaacatgggccccattccaaaggatgacctcaatgaaagaccagcaaaatctacctgtgacagtgagaacttggcagtcatcaacaagtcttccaggagggttgaccaagagaaatgcactgtacggaggcaggatcctcaagtagtatctcctttctcccgaggcaaacagaaccatgtgctaaagaatgtggaaacgcacacaggttctctaattgaacaactaacaacagaaaaatacgagtgcatggtgtgctgtgaattggttcgtgtcacggccccagtgtggagttgtcagagctgttaccatgtgtttcatttgaactgcataaagaaatgggcaaggtctccagcatctcaagcagatgg

SEQ ID NO: 460 - DNA, 584 bp, Homo sapiens
  misc_feature 530: n = A,T,C or G
gccgttggtcctgtgcggtcacttagccaagatgcctgaggaaacccagacccaagaccaaccgatggaggaggaggaggttgagacgttcgcctttcaggcagaaattgcccagttgatgtcattgatcatcaatactttctactcgaacaaagagatctttctgagagagctcatttcaaattcatcagatgcattggacaaaatccggtatgaaagcttgacagatcccagtaaattagactctgggaaagagctgcatattaaccttataccgaacaaacaagatcgaactctcactattgtggatactggaattggaatgaccaaggctgacttgatcaataaccttggtactatcgccaagtctgggaccaaagcgttcatggaagctttgcaggctggtgcagatatctctatgattgggaccccgcctgcctgtcctgtgcccaccacgcagcagtcaggggagaaaatggtggctatcccttctgcttagagaaagaaatggcctttagctggtttcatgnttgtgttttgactggagggagtagaccctatctataaggtgccccccatcatcc

SEQ ID NO: 461 - DNA, 471 bp, Homo sapiens
  misc_feature 421, 430, 455: n = A,T,C or G
cctgacattcctgccttcttatattaataagaaaaataaaacaaaatggtgttgaagtgttggggcggcgaaaatttttggggggtggtatggagagagaatgggtgatgtttctcagggctgcttcaagtgggattggggcggcgtgggaacataaagtgggagagattaagctgaagggaagtcttgtggtaagggatgatattgtggggatgttagaagaaacatttgtcatatagaatgattggtgatggcctggatacagttttggatgaactgagaagctaaatggaagatacaaggtctgaataaaaggaggagaaaaatgggtattaaaggactaagaattgggaggacccaggacatccaattagagagtgcccaagggggttcagcgtaattacttgcttggttggcaagnttttgggcnctatccttgagtttttttatgttgncatacaccaggccaga

SEQ ID NO: 462 - DNA, 315 bp, Homo sapiens
ctgctgcagcagcggcactacaagccaaatcagatgagaaggcggcggttgcaggcaagaagcctgtggtaggtaagaaaggaaagaaggctgctgttggtgttaagaagcagaagaagcctctggtgggaaaaaaggcagcagctaccaagaaaccagcccctgaaaagaagcctgcagagaagaaacctactacagaggagaagaagcctgctgcataaactcttaaatttgattattccataaaggtcaaatcattttggacagcttcttttgaataaagacctgattatacaggcagtgaaaaaaaaaaaa

SEQ ID NO: 463 - DNA, 174 bp, Homo sapiens
aaagagtgggctgcaccccccacacgccatttacatcagcttcataaacacttttcttcctccctgtaacttaaccttttttcccttttatgaagttgagaggctttatgaaataagtttgcattgcacatccgtgcagaaatctttctgactttgaaatttttaggacgtcag

SEQ ID NO: 464 - DNA, 329 bp, Homo sapiens
ccatcttccacaagtactccggcagggagggtgacaagcacaccctgagcaagaaggagctgaaggagctgatccagaaggagctcaccattggctcgaagctgcaggatgctgaaattgcaaggctgatggaagacttggaccggaacaaggaccaggaggtgaacttccaggagtatgtcaccttcctgggggccttggctttgatctacaatgaagccctcaagggctgaaaataaatagggaagatggagacaccctctgggggtcctctctgagtcaaatccagtggtgggtaattgtacaataaattttttttggtcaaattt

SEQ ID NO: 465 - DNA, 384 bp, Homo sapiens
  misc_feature 167: n = A,T,C or G
ttctggggtaggaagtggtcccgggagattttggatggaaaagtcaggaggattgacagcagacttgcagaattacatagagaaattaggaacccccaaatttcatgtcaattgatctattccccctctttgtttcttggggcatttttccttttttttttttttgnttttttttacccctccttagctttatgcgctcagaaaccaaattaaaccccccccccatgtaacaggggggcagtgacaaaagcaagaacgcacgaagccagcctggagaccaccacgtcctgccccccgccatttatcgccctgattggattttgtttttcatctgtccctgttgcttgggttgagttgagggtggagcctcctggggggcactgg

SEQ ID NO: 466 - DNA, 380 bp, Homo sapiens
ctgctttatttggagaaataccgacctaagatgcgattacgcttcagagataccaatgggcattgctgtgttcagtagaaggaaatgtaaacgaaggctgacttgattgtgccatttagagggaactcttggtacctggaaatgtgaatctggaatattacctgtgtcatcaaagtagtgatggattcagtactcctcaaccactctcctaatgattggaacaaaagcaaacaaaaaagaaatctctctataaaatgaataaaatgtttaagaaaagagaaagagaaaaggaattaattcagtgaaggatgattttgctcctagttttggagtttgaatttctgccaggattgaattattttgaaatctcctgtcttttt

SEQ ID NO: 467 - DNA, 250 bp, Homo sapiens
cgcgactggtaccagaagcagaggcctgggccctcccgcgactacagccactactacacgaccatccaggacctgcgggacaagattcttggtgccaccattgagaactccaggattgtcctgcagatcgacaacgcccgtctggctgcagatgacttccgaaccaagtttgagacggaacaggctctgcgcatgagcgtggaggccgacatcaacggcctgcgcagggtgctggatgagctgaccctgg

SEQ ID NO: 468 - DNA, 274 bp, Homo sapiens
aaatacagagagtcttagtttggactgaaagagaaaaattgctctgatctttctaaagcttgaacattaaggcttctttgcaattttcttagagctctttgatcgttaattatatctttccatcgaagagaagcagatttcttctgagatttctgaacagttcctgggtgtttccggttctgcttcagtgtaccatcactttgccttgcctcagtctctccttcctccggggccacagaaggagaaagcccaaagcatacccatcctgcccttt

SEQ ID NO: 469 - DNA, 168 bp, Homo sapiens
ccagtccacagttgtagcctgacttcagtgagttctgatgtgtgctttttgcaaatacatgttctcagaacagtgagatcatccagcagtggcctggattgcactcacataaaaatcatgagacagccatggctacttgtttctgtaatacatgcatgtgtgtttttt

SEQ ID NO: 470 - DNA, 411 bp, Homo sapiens
ctggctagtggcttattacttgtgactggacctctggtcctcaatcgagttcctctacgaagaacacaccagaaatttgtcattgccacttcaaccaaaatcgatatcagcaatgtaaaaatcccaaaacatcttactgatgcttacttcaagaagaagaagctgcggaagcccagacaccaggaaggtgagatcttcgacacagaaaaagagaaatatgagattacggagcagcgcaagattgatcagaaagctgtggactcacaaattttaccaaaaatcaaagctattcctcagctccagggctacctgcgatctgtgtttgctctgacgaatggaatttatcctcacaaattggtgttctaaatgtcttaagaacctaattaaatagctgactacaaaaaaaaaaaa

SEQ ID NO: 471 - DNA, 628 bp, Homo sapiens
  misc_feature 495, 569: n = A,T,C or G
ctgaggagactccggcgctcgccatggccgacgaaaagcccaaggaaggagtcaagactgagaacaacgatcatattaatttgaaggtggcggggcaggatggttctgtggtgcagtttaagattaagaggcatacaccacttagtaaactaatgaaagcctattgtgaacgacagggattgtcaatgaggcagatcagattccgatttgacgggcaaccaatcaatgaaacagacacacctgcacagttggaaatggaggatgaagatacaattgatgtgttccaacagcagacgggaggtgtctactgaaaagggaacctgcttctttactccagaactctgttctttaaagaccaagattacattctcaattagaaaactgcaatttggctccaccacatcctgactactaccgtatagttttctctattctttcatttcccccttccccattcctttattgtacataaagtaactggtatatgtgcacaangcatattgcattttttttttactaaacagccaatggtatgttttgattgacatcaagtggagacgggatggggnaaaatactgattctgtgaaatacccccttttctccattagtggcatgctcattcagctc

SEQ ID NO: 472 - DNA, 385 bp, Homo sapiens
aaatgagaatacgagaatacccagaattttattcccagcctttgtgtggaaaaggcagtttgcattcttaggaaacatctaactgttacctaaaccataaatatttctatctactccattcaacccaattaaagaaaacaaaatgatgagaaaaataggagccgaacagaaagaaaattcacatcattttctactattacgaacattcaaatggtgcttcaaattaaatacttttaattatcattctagccaggatcatactaagtaggatctcatgacagtcacatatgcagcgacttcacctaaaccgtggcactgaatgctctgccatgagccgcaagcagcacagtgatcatcacccacaaggacaggttgctgggatgag

SEQ ID NO: 473 - DNA, 464 bp, Homo sapiens
aaatatattaaatatttcactgaaatacatggttcaccatcctcccccacccccacagtggttacattataaaaccaaagcccacggcctcccacctcctgactcctctaccaactgggtgaggaaagggacaatggtagcccaggggaagggcatggctggcactgtggtacggggatccagggtgtggacaggccctcccacctggcaagaagcagagacaagccacccaaggctgaggtcttcccactctgatctacttataccctcacccctaccccatggcaccaagtagtctcttcctatcccttcctatccagggatatggctggggacaggggagtagattttctgtctggaaaacaagtcttttcccctccttctgccatgactaatgaagtacctgatggcccatttggttgatgtatgaagatgcccaagggaggcattacccagaaaccagg

SEQ ID NO: 474 - DNA, 449 bp, Homo sapiens
ccgggcaggtgttcggactatttgtagtcatgtacagaacatgatcaagggtgttacactgggcttccgttacaagatgaggtctgtgtatgctcacttccccatcaacgttgttatccaggagaatgggtctcttgttgaaatccgaaatttcttgggtgaaaaatacatccgcagggttcggatgagaccaggtgttgcttgttcagtatctcaagcccagaaagatgaattaatccttgaaggaaatgacattgagcttgtttcaaattcagcggctttgattcagcaagccacaacagttaaaaacaaggatatcaggaaatttttggatggtatctatgtctctgaaaaaggaactgttcagcaggctgatgaataagatctaagagttacctggctacagaaagaagatgccagatgacacttaagacctacttgtgatattt

SEQ ID NO: 475 - DNA, 413 bp, Homo sapiens
  misc_feature 317, 383, 402: n = A,T,C or G
ctgtcaccattctcacgtgattcttgtgagactctttttggttataattactatttaatatttagactattttactgagcagactttataaatgagatatctacaaggcacttaaagtgttacagatgttttaccttaagaattatttaagttgtgttgggttaagacagttttcagtgtaccgtaaatgttgtgttttcagaaaaagacaaaacgatggtgctgactggttttctgtatattgcacaacagccctcaaatacactgatgtatgaaactattcatacatcaagcagcatttttttcactctccttanaattggaactatgcagttaaggcagataaaatgtacagatgtttcatatattacagggtacatatntaaatcaaaatttcctatntaaaactgatt

SEQ ID NO: 476 - DNA, 316 bp, Homo sapiens
aaaaagtcaccctacttagaaatcttctgtgggggtgggagggacaaaagattacaaaccaaaactcaggagatggtaacactggaattgataaaatcacctgggattagttgtataactctgaaccaccaaacctctgctatcaagccttgctacagtcatggctgtccagaaagatttacagttatttttctgagaaaggatccatgggctttaagaacttcagaactttaagaacttcagaagttcttaagttgctgaagctcaagtaacgaagttgaatgcaatcaaaaaaagaataccagggagtcaaggc

SEQ ID NO: 477 - DNA, 154 bp, Homo sapiens
ctgctgcccgtgctggtgccattgccccatgtgaagtcactgtgccagcccagaacactggtctcgggcccgagaagacctcctttttccaggctttaggtatcaccactaaaatctccaggggcaccattgaaatcctgggtgtccgcaatgt

SEQ ID NO: 478 - DNA, 496 bp, Homo sapiens
ctgaatcttagcggctacagaaagaatctccagaaatcagatctctctactttagttagaagatgccccaatcttgtccatctagacttaagtgatagtgtcatgctaaagaatgactgctttcaggaatttttccagctcaactacctccaacacctatcactcagtcggtgctatgatataatacctgaaactttacttgaacttggagaaattcccacactaaaaacactacaagtttttggaatcgtgccagatggtacccttcaactgttaaaggaagcccttcctcatctacagattaattgctcccatttcaccaccattgccaggccaactattggcaacaaaaagaaccaggagatatggggcatcaaatgccgactgacactgcaaaagcccagttgtctatgaagtatttattgcaggatggtgtctcttctttagaacagggaaaataggcaggaagcccaattgctggagtacttagctagtt

SEQ ID NO: 479 - DNA, 521 bp, Homo sapiens
aaaaagttgtatttatagccccagtaaccggaaagaattataagtaattatggaagtattatattctgaccataccaagagttaaaaacaaagagttcctactaaagaggaatattttcaagatgatctggtcacatcatgtgcatagttaagattgtttgttttaataaagattcttttgcaaataaagaaataaaatttagtaaagttattcttctcttgatgaaaaaaccttaaaaatgaaccactggtggtttaagaaggggggaaaaaagagtaagctacatattgaagttctagaatgcagcacctcaacttcacatcttccataagcatttaagattaagaaatccaagtgatgtcttgacgatcgaatcacactttatagttcttccaattccaatgtctgactttagcatctcatgtcaattaaaagttccctaatacaaaatattgtgctaaagagtgctaagattctgcatgctgctgccattccctggtcccgttcatgcttgtagctg

SEQ ID NO: 480 - DNA, 381 bp, Homo sapiens
  misc_feature 3, 24, 245, 251, 277, 284, 305, 309: n = A,T,C or G
gtngaccggggcgcgggctccatncgggaagccggtggggccttcggaaagagagagcaggctgaagaggaacgatatttccgagcacagagtagagaacaactggcagctttgaaaaaacaccatgaagaagaaatcgttcatcataagaaggagattgagcgtctgcagaaagaaattgagcgccataagcagaagatcaaaatgctaaaacatgatgattaagtgcacaccgtgtgccatanaatggnacatgtcattgcccacttctgtgtanacatggntctggtttaactaatatttgnctgngtgctactaacagattataataaattgtcatcagcgaaaaaaaaaaaaaaaaaaaaaaaagcttgacctgcc

SEQ ID NO: 481 - DNA, 419 bp, Homo sapiens
cctttatttatctagctcaaagtagacactatcacaatcttgtttgttactccttttactaaaatagttcaaatcaatgtttttaccacactatcaaaaagttctatttcttcttgtctccccacgtcagagtggttgaatagaaggtagaaacaggccgggagtccacgggctcccagctctaaacggcgccagggcaggaaggggtggctccaggtctcactgtggcaccttctacagaaaatagacgtagctgccgggcccggggacagaaaccagacgttccagtccatctccaaaaagcagcacaaatactttgccccacagtatgaaaaatatacacctctaccgctctgcagtcatgcatttagttttaagaaaaaaaaaatcagtagtatgtatcttgtttcctcaagttt

SEQ ID NO: 482 - DNA, 314 bp, Homo sapiens
ctatcttcctgggtagatgccctggtgtagggctgagtactgaatggtcttccatccccagcaagggggtgcagcccagggtcaggcccttcagagccagggcagaggacgcacggtggctagagccgctgcactatccttttcagagcacttcatccacttgctcctccctctaccctcggcaccctgggtgggaaagggttgatgctcatcatttattgaggggaagccacttaataaggagtcagacctaaaagggggtgggggacattttcttacctcacccaagaaagaggtcgtcacttttgctgtgg

SEQ ID NO: 483 - DNA, 470 bp, Homo sapiens
  misc_feature 418: n = A,T,C or G
cttggctaatttttgtattattagtagagacggggtttcagcatgttggctaggccggtctctcctgacctcagggtgatcagcccacctcggcctcacaaagtgctgggattacaggcgtgagccaccttgcccagcccacatcatacagtttgaaatgaaactttgccacaaccagcctttgctgtagcacacacatatatcactgaacctgtttgaaataaagttttttttctttttcatgattcgtctttgagtacctccaggctgaaagactgttgtaccagtaaaaacttaaaggcacaaattctccttgaagaccttctcccttttatgtggccccatattttatgttgctttatctttgaaattttgcatgaaaaggaaatgaatggattcgaatgaaattgtcctttanagcatgattacttgttcccatggacaaatatttttctccccttgctcttcct

SEQ ID NO: 484 - DNA, 252 bp, Homo sapiens
ctggagcagcagcagtggagggggcaggacctcctgctggtgcagcaccagcctaaatgctccacttaaaagatacagaactgcagaatgggtaagaactcaccaaccaatcatctgctgccttcagaagactcacctagcacataaggactcaaataaacttaaagtaaaggggtggaaaaaggcatttcatgcaaatggacaccaaaagtgagcaggggtagctatccttacatcagacaagcaaacttt

SEQ ID NO: 485 - DNA, 520 bp, Homo sapiens
aaaagaagaaatcatgcaagaaaacaaagggaacaaaaaatctgccagcgttatgatcagctcatggaggcatgggagaaaaaagtggacagaatagaaaataatcctcggaggaaagctaaagaaagcaaaacaagggaatactatgaaaagcagtttccagaaattcgaaaacaaagagaacagcaagaaagatttcagcgagttgggcagaggggagctggtctttcagccaccattgctaggagtgagcatgagatttctgaaattattgatgggctctctgagcaggagaataatgagaaacaaatgcggcagctctctgtgattccacctatgatgtttgatgcagaacaaagacgagtcaagttcattaacatgaatgggcttatggaggaccctatgaaagtgtataaagataggcagtttatgaatgtttggactgaccatgaaaaggagatctttaaggacaagtttatccagcatccaaaaaactttggactaattgcatcatacttgg

SEQ ID NO: 486 - DNA, 568 bp, Homo sapiens
  misc_feature 433, 475: n = A,T,C or G
ccttgctatgaagcagtgtgtgaatggacaatgttgaatgaatgtctggctcagtgatggagagccaggttcatctttgaaatctagggctcttcactcatgaagcagactcctagtcctggagtgactgtgtacgagagcgtggttgtggtgctgtatgtgaacgcatgcaagcttgattcaccttcagggggctgataacctagtaaatcatcaaaatgagatcataagtgttaatgtacactggacatgaaaacaaagactggtttagcagcagacattggtttactctgcagcctgtgttttctgtttccccctttcccacctccttccccccacccaatccttttttttttcttttttgcttttcttttcttttttttagtttttatttactttacctagtatgcctttttttagttgcttctcaagncagaaaacttttcaggaaggtttccctgtgcatttgcaccanatgaatgtttgatgctatgaaaagctttccatatcatcaaaactaatttgtgtagatttttgcatgaaaaaaatcataaatttccctcaaaat

SEQ ID NO: 487 - DNA, 379 bp, Homo sapiens
ctgcagcctgggactgaccgggaggctctgaccatttacccaccacaggtaggttgtgttctgaacctcaggttcacaggtgaaggccacagcatccttgtcctccacggggttggagttgttgctggagatggagggcttgggcagctccgggtatacatggaactgtccggttgcttcttcattcacaagatctgactttatgacttgtagggtatagaatcctgtgtcattctgggtgacgttctggatcagcagggatgcattggggtatattgtctctcgaccactgtatgcgggccctggggtagcttgttgagttcctattacatatcctacaattagactgttgccatccactctttcgcctttgtaccag

SEQ ID NO: 488 - DNA, 475 bp, Homo sapiens
  misc_feature 361: n = A,T,C or G
ctgtcaggggcggcgtgcctggtgatgcggcatcttaccttcatccccatctcagaatgggcagccagtctcagattcaaggaggaggaatcctgaggtgtggcgttcagtcctgaggtagacctgaggtcccctggaaattgtgttgatgctgagatggatgaggggtgctcattctctcaggtagacagtgaggagtcctggttcagccgagcctccatgtctgcatggatggttatgaccctgattgtttttggaaacagccaagctctctaggtgtactcagcaaatgcaaggtatagtgggtcctgcatacccagggtattatttgagccatggaagcaaaacagagactgcttancctccctaagagtagttggtgggagaggccagcaaccatggaggcaggagcagctcctctttgcctctgagtagtccccacatgttcccccttccagagatttcaactgccagg

SEQ ID NO: 489 - DNA, 342 bp, Homo sapiens
  misc_feature 324: n = A,T,C or G
ctggcccttgaagtccaggtcgatggtgaagtccaggtcccggttgttcttggcgttgggccgcatgccgatggtgccgaagatctcctcgcccgtcttcacggtcaggtagtcctccatgtagaacaccgtctgcttccagtgcgtgtacggggactcggggctggtggagaagccggtcctcttgtggcagcgtgtgaactcgatgttgaagtaggccaccagggcgtgcacgtagtcattccgcttcacttgcaggcagaacggggaggtgaaggtcaggtcttccaccttgacggtatagatgtccacctcctttatgangcaggcgttggtgaccag

SEQ ID NO: 490 - DNA, 428 bp, Homo sapiens
ccatagctgaagctgtggggccagttgatacctgctggcaggaaatggctgttttttaggtttgtatttatgtgccgccacttttgtaaggcctgggagatcccagggtcctccaccctccccctgaccacatacaaaggcactctagttcaagagtgaaaaatctcacccaggaggaacagccctccttgaagcaatggcagggccagcagggaggtgggcatggcagggaatggagagagtgagccagacagacttcacctccttactggacacagggtcaagggcgagtttcaattgctgctccctttactttctctacctgtgactactccctggaccaatcctgaggagggcacattttccagaagccacgtgataggggctggtttctgtggagccagaggcagagacactgaacttgagct

SEQ ID NO: 491 - DNA, 450 bp, Homo sapiens
ctttgacttggactatgactttcaacgggactattatgataggatgtacagttacccagcacgtgtacctcctcctcctcctattgctcgggctgtagtgccctcgaaacgtcagcgtgtatcaggaaacacttcacgagggggcaaaagtggcttcaattctaagagtggacagcggggatcttccaagtctggaaagttgaaaggagatgaccttcaggccattaagaaggagctgacccagataaaacaaaaagtggattctctcctggaaaacctggaaaaaattgaaaaggaacagagcaaacaagcagtagagatgaagaatgataagtcagaagaggagcagagcagcagctccgtgaagaaagatgagactaatgtgaagatggagtctgaggggggtgcagatgactctgctgaggagggggacctactggatgatgatga

SEQ ID NO: 492 - DNA, 431 bp, Homo sapiens
ccagagggctgtgctgaagtttgctgctgccactggagccactccaattgctggccgcttcactcctggaaccttcactaaccagatccaggcagccttccgggagccacggcttcttgtggttactgaccccagggctgaccaccagcctctcacggaggcatcttatgttaacctacctaccattgcgctgtgtaacacagattctcctctgcgctatgtggacattgccatcccatgcaacaacaagggggctcactcagtgggtttgatgtggtggatgctggctcgggaagttctgcgcatgcgtggcaccatttcccgtgaacacccatgggaggtcatgcctgatctgtacttctacagagatcctgaagagattgaaaaagaagagcaggctgctgctgagaaggcagtgaccaaggaggaat

SEQ ID NO: 493 - DNA, 471 bp, Homo sapiens
  misc_feature 457: n = A,T,C or G
cccagctaattttgtatttttaatagagacggggtttctccatgttggtcaggctgttcttgaactcctgacctcaggtgatctgcctgcctcggcctctcaaagtgctgggattacaggcatgagccgccatgcccagcccaacatactcaattatttgctgcctgttctttcatcccttccagcaacatgccatagaactagagatgataaaacaacacttgtttgtttctatgtcatgacgtgggtcctatgattctattgattagtattcacagcattcaattattcaaaaaccaaggaagagcttttcataggtctaataaaaaagaaatagaggcagaaagaaatgggggcaggtaaaccttattgcttggactgacacacattttagactttcacattactccagactcaaaaaaggtaaaccaaaatgttcttagaacttcattattgnttaatcattgacag

SEQ ID NO: 494 - DNA, 370 bp, Homo sapiens
aaagttgctttgctggaagtttttataaggaatctcaaattaaacttttagaagtttaattgacactaggaagccaaaccaaggctgacttcagactttgtttgtagtacctgtgggtttattacctatgggtttatatcctcaaatacgacattctagtcaaagtcttggtaatataaccaatgttttcaaatgtattctgttatacaaagagcagatttttattgaacttgtgcaataactatattaccatacaatataaatattcatgaatagtttcccaagtctggagcgaccacatagggagaaaatgtaaatgtctcaatttttgttcacaaaagtatattttatcaaattgctgtaagctgtg

SEQ ID NO: 495 - DNA, 366 bp, Homo sapiens
ctgatctggttgaaggcggtgtggtcgtaaattggctttgtccagtaagtacagggtatggggataggggtaaggatagccttcctggaatcctgtgtcatttttcacatcataaatattgcattcatgaagatcgatgatgggtgatatggggtagaaggtctctagaacatgattcttagtagcttcaatctcctctctggaggcgatggtgggcagaggatccttagtgctcagtcgggctccaccagaaccacggacttgaaggagaagagactctcggttccaggtagcagaaaacgtggagttttggacacagatcctcctggtcagagaaggatgcttgagaatctgagatttacacag

SEQ ID NO: 496 - DNA, 192 bp, Homo sapiens
ctgcggtggtaggctgcagacctcacccgcaccgatccagaccactcctcccaaggacacttgtagcccggagctgctcatgtccttgatccagacaaagtgtgccgacgacgccatgaccctggtactaaagaaagagcttgttgcgcatttgaagtgcaccatcacgggcctgaccttctgggaccccag

SEQ ID NO: 497 - DNA, 241 bp, Homo sapiens
cctaccgcaaggtcacagcacagttttgtatagaatgttgcagaaaacaggatggagaagccactactgctgctatgaaggagtgcggggggcggggcggggggtcccacagaacctgctttccaaacgctgctgctgaacactggccttgaaatgaacaccaggacaatctgtgtgtgatgggaatgagccacctcagatgtggagggccctgaagaatccatataggagggcaggctct

SEQ ID NO: 498 - DNA, 194 bp, Homo sapiens
ctgtccctccactacagaaacctcacagaacacagcaaaggataagtgcaagaaggctgcttccagctccaaagcacctaagaatggaggtaaagcgaaggattcagcaaagacaacagaggaaacttccaagccaaaagatgactaaagaaatacaagttaaggtatctggtatctgcatgtaaaatcttcag

SEQ ID NO: 499 - DNA, 398 bp, Homo sapiens
  misc_feature 395: n = A,T,C or G
tttttgtgtgagcaacaaggctgtttatttcacctgggtgcaggcgggctgagtccgaaaagagagtcagcaaagggagatggggtggggccgttttataggattagggaaggtaatggaaaattacagtcaaagggggtttgttctctggtgggcaggtgtggatctcacaaagtacactctcaagggtggggagaattacaaaggaccttcttaagggtgggggagattacaaagtacatttatcagttagggtggggcaggaacaaatcacaatgttggaatgtcatcagttaaggctgtttttacttcttttgtggatcttcagttacttcaggccatctggatgtatacgtgcaagtcacaggggatgcgatggcctggcctgggctcanagg

SEQ ID NO: 500 - DNA, 437 bp, Homo sapiens
  misc_feature 344, 428: n = A,T,C or G
ctgttagagtatttagagtcctgagataacaaggaatccaggcatcctttagacagtcttctgttgtcctttcttcccaatcagagatttgtggatgtgtggaatgacaccaccaccagcaattgtagccttgatgagagaatccaattcttcatctccacgaatagcaagttgcaagtgacgaggggtaatacgctttacctttaagtcttttgatgcatttcctgccagttcaagtacctctgcggtgaggtactccaggatggctgcgctgtacacagcggcagtcgcgcccacacgtccatgactggtcgtcctagattttaggtgtcgatgaatacggnccactgggaactgcaagccggctctctgcgagcgggaaaccgcctttgtcttggcctttccggagtcctttccagccttaccgncagccattt

SEQ ID NO: 501 - DNA, 488 bp, Homo sapiens
  misc_feature 478: n = A,T,C or G
ccaatcagtgggatccgaggtggctcggcccatcatgcccaggatctgagcccacatctggcaccagctctaccaagggcctgttgggcccacacaagcttgcctgtacctagtcaggctggtaccggcacctcctgaaatgggtcaccctccggttcctgctcagcagctctgagcccttttccagcctcttggagggaagtaacaacagcagcatctgccgaggagcacacggttcaggctccatcaatgacggtgatgtcgaggggccccagggctaccctccacctcgagttacctttgatcacaactagggcatctttctggctgagttaaggtgagaacagtcccctgaagcctcccccaaataagtgaaaagtgctctactgtggggtctggaaagaagaaagcaaaaagcagcctattcacgttcacagtcgaaaaatgtaagctaaattgtaaacctgctcaaagaaantctagaaagg

SEQ ID NO: 502 - DNA, 589 bp, Homo sapiens
  misc_feature 422, 537, 547, 558, 568, 575: n = A,T,C or G
aaatcaacattaaccaaagtacctgcaagtaacactgcttactcttgctgtttgcctcatctgactggaaaccttagcccccaaatatgaaatgccttctctagattaaaaggattcagagatgttacactattgcactatatttctgcttcccgatctcgtttctgagtcctagtgaaatcgtaaacaagagatgaaataaacgtcgctccattttaataccgtctttagtatcatacacatgtgttcagtagtgagccacccaaagcctcctgccacaggagcagtagtcgaagcacagaggggaccccgctctgctgcctccccatgcagtccagtgatgaggtggatggagtcctccccacagtcacaccccaagcttcctcttctggtggaaataggcatcaaaccttgcttgggcntagtccagcttccaacccaaagtcgggcactacaggctggagaatgaagtggtaaccgataaataaaaccttccacagcacaggcaggagccacccactcttcttcacttactgncccgtgtcanaagggactgangtcagagctngacttcnagggtgcagatgcc

SEQ ID NO: 503 - DNA, 192 bp, Homo sapiens
  misc_feature 35, 36, 38, 71, 125, 143, 189: n = A,T,C or G
gcttttttttttttttttttttttttttttttaanncncagggtttatttgcaaaactgggctgggttgancaaagggggctttgggatgctgacccctctctgacctggccgttgcgacctcanccctgagttaccctgcancaggcatggacaggcggccgccttgcctgtcgcaacttcctggcancaa

SEQ ID NO: 504 - DNA, 473 bp, Homo sapiens
  misc_feature 427: n = A,T,C or G
cctgacattcctgccttcttatattaataagacaaataaaacaaaatagtgttgaagtgttggggcagcgaaaatttttggggggtggtatggagagataatgggcgatgtttctcagggctgcttcaagcgggattaggggcggcgtgggagcctagagtgggagagattaagctgaagggaggtcttgtggtaaggggtgatatcatggggatgttagaagaaacatttgtcgtatagaatgattggtgatggcctggatacggttttggatgatttgagaagctaaatggaagatacaaggtccgaataaaaggaggagaaaaatgggtattaaatgtctaagaattgggaggacctaggacatctgattagagagtgcctaaggagattcagcatagtcctgccagcaaagattatttacttnaagagttaagagtggcagtttgggggatagcaccaggagatatcag

SEQ ID NO: 505 - DNA, 131 bp, Homo sapiens
ccaaatatcatctttgatgacctctcctaactcatcagcacctgcatcagaatggtcagtaaaccaggtaaagaagctctctggttcctcatgctgcctcttcctgctggctttattctgtgtttgactcg

SEQ ID NO: 506 - DNA, 504 bp, Homo sapiens
  misc_feature 195, 476: n = A,T,C or G
gtgcaaaggatgagttgcacattgttgaagcagaggcaatgaattacgaaggcagtccaattaaagtaacactggcaactttgaaaatgtctgtacagccaacggtttcccttgggggctttgaaataacaccaccagtggtcttaaggttgaagtgtggttcagggccagtgcatattagtggacagcacttantagctgtggaggaagatgcagagtcagaagatgaagaggaggaggatgtgaaactcttaagtatatctggaaagcggtctgcccctggaggtggtagcaaggttccacagaaaaaagtaaaacttgctgctgatgaagatgatgacgatgatgatgaagaggatgatgatgaagatgatgatgatgatgattttgatgatgaggaagctgaagaaaaagcgccagtgaagaaatctatacgagatactccagccaaaaatgcacaaaagtcaaatcagaantggaaaagactcaaaaccaccatcaaca

SEQ ID NO: 507 - DNA, 337 bp, Homo sapiens
ccacacatagcacagccaccagtgtcctcagaactagcagtcagggtcacagaacagtattcaaaatgattgcccacctgttttagaaatctaaaattttacatgtaactaagagcaaagtgctatgtgggttttagaccatgactgtttgtttgctctcctgccctaccaccaagcaaagcagcagggctcctgggggagagggatttcaacccccctgatggcagggggtgctctggggaggagagaggagagaacaggctgttttggaaaattccagcactttgacttcgggccatgcgtctctcctggacgttctgagtacggatcgctcagg

SEQ ID NO: 508 - DNA, 319 bp, Homo sapiens
agtaagtcaacagcttattttaggaaactgtaaaagtaatagggaaagagatttcactatttgcttcatcagtggtaggggggcggtgactgcaactgtgttagcagaaattcacagagaatggggatttaaggttagcagagaaacttggaaagttctgtgttaggatcttgctggcagaattaactttttgcaaaagttttatacacagatatttgtattaaatttggagtcatagtcagaagactcagatcataattggcttatttttctatttccgtaactattgtaatttccacttttgtaataattttgattt

SEQ ID NO: 509 - DNA, 454 bp, Homo sapiens
ctggcttcactgctcaggtgattatcctgaaccatccaggccaaataagcgccggctatgcccctgtattggattgccacacggctcacattgcatgcaagtttgctgagctgaaggaaaagattgatcgccgttctggtaaaaagctggaagatggccctaaattcttgaagtctggtgatgctgccattgttgatatggttcctggcaagcccatgtgtgttgagagcttctcagactatccacctttgggtcgctttgctgttcgtgatatgagacagacagttgcggtgggtgtcatcaaagcagtggacaagaaggctgctggagctggcaaggtcaccaagtctgcccagaaagctcagaaggctaaatgaatattatccctaatacctgccaccccactcttaatcagtggtggaagaacggtctcagaactgtttgtttcaattgg

SEQ ID NO: 510 - DNA, 325 bp, Homo sapiens
  misc_feature 37, 70, 95, 146, 154, 164, 167, 226, 279, 317, 320, 322: n = A,T,C or G
agctttttttttttttttttttttttttttttttttngcattgcaaaaatttattaaaattggagacccntgttttaatcttcttgtgccatganactccatcaggcagtctacaaagaccactgggaggctgaagatcacttgancccaaaantttgaggctntantaagcttcaaaggccactgcaccctaacttgggtgaggcaagaccctttcaagcataanctgcatgcttgcttgttgggggcattaaaaaccctgaaagcgaagcccacatnttaatcagggcaaaatacaaatgtgtgatgcttgttantanantaa

SEQ ID NO: 511 - DNA, 136 bp, Homo sapiens
cctctggttgcaggactcgtgaatggagcagttctgagaaccacccttttgctaagggagcttgggagccacatggctgctcccttcacactgggtaacagtgtagtatcctgtgagagaataaatgtattcattt

SEQ ID NO: 512 - DNA, 474 bp, Homo sapiens
cagccggggaggctcccctcagatggatgacatcaaagtgttccagaatgaagttttaggaacactacagcggggcaaagaggagaacatttcttgtgacaatctcgtcctggaaatcaactctctcaagtaagagcagcccctccctgttctcctcggggtgatcccgggaaggtagaggctttctcgtaagtgttttgtctccaaataggaacctattccttcgacatcccaaatggaaagaccagtagtatttggagcagggagagcattattaagttctagcctcagcatagactttctccttcctaaaccctccccttccatattgttccatccagattcctctccaatgtctatcaaagtcatagttctaagcctgctgaaaggccagtgaaggccctggtgtcaccccagtctccccacaggtatgcctataacgtaagtctaaaggaggtgatgcaggtactgagc

SEQ ID NO: 513 - DNA, 315 bp, Homo sapiens
ccacacaggctatctgaacacggtgactgtctctccagatggatccctctgtgcttctggaggcaaggatggccaggccatgttatgggatctcaacgaaggcaaacacctttacacgctagatggtggggacatcatcaacgccctgtgcttcagccctaaccgctactggctgtgtgctgccacaggccccagcatcaagatctgggatttagagggaaagatcattgtagatgaactgaagcaagaagttatcagtaccagcagcaaggcagaaccaccccagtgcacctccctggcctggtctgctgatgg

SEQ ID NO: 514 - DNA, 385 bp, Homo sapiens
aaaaatatttacgtcttacaggagctggataatccaggtgcaaaacgaattctagagcttgaccagtttaaggggcagcagggacaaaaacgtttccaagacatgatgggccacggatctgactactcactcagtgaagtgctgtgggtctgtgccaacctctttagtgatgtccaattcaagatgagtcataagaggatcatgctgttcaccaatgaagacaacccccatggcaatgacagtgccaaagccagccgggccaggaccaaagccggtgatctccgagatacaggcatcttccttgacttgatgcacctgaagaaacctgggggctttgacatatccttgttctacagagatatcatcagcatagcagaggatgagg

SEQ ID NO: 515 - DNA, 216 bp, Homo sapiens
aaatttcatttactttgttttactgtaatttacacaagagactgacaagtaaactaggtattttacattcaccacacattccctcaaatctccacagttgttagaaaaacattaaaatccatgcgccgggctctcatttccatgtgcgcctaagctcccaatgatactacagatgccagcgagagttaagttcattaaaaggagagggctagactc

SEQ ID NO: 516 - DNA, 324 bp, Homo sapiens
cctctgttgccagaccagagctggaggtaaatgctgccatagtctctggacaaagcagtgagcccaaagagatagttgaaaagtccaaaatcccaggccgaagaaactcccgaactgaagagccaactgtggcctctgaaagtgtggaaaatggacatcgtaaacgatcttctcgacctgcttcagcctccagctctactaaagacataaccagtgcggtgcaatccaagcgaagaaaatccaagtaaacaagcaggactgcgacttgatacttggaaatgtgtgtgacttttacaaagagcaattttgagctgtgactttttt

SEQ ID NO: 517 - DNA, 279 bp, Homo sapiens
ctgaccccgcctgagggctcctcaaagtctgagcaagaccaggcagaaaatgagggcgaggactcggctgtgttgatggagagactgtgcaagtacatctacgccaaggaccgcacagaccggatccgcacatgtgccatcctctgccacatctaccaccatgctctgcactcgcgctggtaccaggcccgcgacctcatgctcatgagccacttgcaggacaacattcagcatgcaggcccgccagtgcagatcttttacaaccgcaccatggtgcag

SEQ ID NO: 518 - DNA, 390 bp, Homo sapiens
aaaaagtagttagcatttaatgaaactccctccatgtggcttcaagccaccaggacacaggcccccccaacactcttaatcttctcctcagctcttctgctgaagaatttggccttcacgatgacaggctgctttgggagctttccctttcccagaactttgtagtagcccgatcgcaccacatcaatgatgggagcagcccccgtcttgtttttagcagcattcacccgtgtctgttcactgaccaaagtccacaatttgtcaaggttgacagttgggcagaagctctggttcctctttaagtggtaatgcttcataccaactttcccaaagtagcctgggtggtatttgtcgaagttgatccggtggtgatgcagaccaccagcatta

SEQ ID NO: 519 - DNA, 476 bp, Homo sapiens
ctggtgaatgacggtgccatgactgaggtggtcgaaagggagtatttaaggggaaatcaggcattccgttttgaccaaattaagctggagatgcctgtggaacattccagccaggctgcatcacgtcacactgaccttcagcattgcccacagtccatcttcccccaggacctgaggattttgcgtccggctccctcctcgcccaggacccccaagctcccagcacgcttctgatttttttttgtaggtttttttttttgttttttgttttgttttgttttgtttttgagagggagtctcactttgtgccctagactggagtgcaatggcgccatctcggcttactgcaacctccacctcccaggtgcaagcgattcccctgcctcagcttcccgagtagctgggattacagatgtgagccaccgtacccagctaatttttgtatttttagtagagacggggtttcaccatattgg

SEQ ID NO: 520 - DNA, 454 bp, Homo sapiens; identical to SEQ ID NO: 509

SEQ ID NO: 521 - DNA, 322 bp, Homo sapiens
ggcctcttacctggacagagtgaggagcctggagaccgagaaccggaggctggagagcaaaatccgggagcacttggagaagaagggaccccaggtcagagactggagccattacttcaagatcatcgaggacctgagggctcagatcttcgcaaatactgtggacaatgcccgcatcgttctgcagattgacaatgcccgtcttgctgctgatgactttagagtcaagtatgagacagagccggccatgcgccagtctgtggagaacgacatccatgggctccgcaaggtcattgatgacaccaatatcacacgactgcag

SEQ ID NO: 522 - DNA, 379 bp, Homo sapiens
aaagcaacagaacctcgctgtcagtgagagtcctgtcacaccctctgcactcgctgagcttcttgacctgctggacagcagaacaatttcttcatcagcagctaaacaggtgtttgaggaactgtggaagagggaaggcaagactccagggcagattgtttcagaaaagcagcttgaactgatgcaggaccagggggcactggagcagctctaccactctgtgatggaggcccatcctcaagtggtaatggatgtgaagaacagaaaccccagagctataaataaactgattgggttggtccggaaagcgactcaaagccgagcagatccagtcatgataaaggagatcctggagaagaagctgtcattgtgagatgtt

SEQ ID NO: 523 - DNA, 415 bp, Homo sapiens
  misc_feature 320, 365: n = A,T,C or G
ctggcttcactgctcaggtgattatcctgaaccatccaggccaaataagcgccggctatgcccctgtattggattgccacacggctcacattgcatgcaagtttgctgagctgaaggaaaagattgatcgccgttctggtaaaaagctggaagatggccctaaattcttgaagtctggtgatgctgccattgttgatatggttcctggcaagcccatgtgtgttgagagcttctcagactatccacctttgggtcgctttgctgttcgtgatatgagacagacagttgcggtgggtgtcatcaaagcagtggacaagaangctgctggagctggcaaggtcaccaagtctgcccagaaagctcanaaggctaaatgaatattatccctaatacctgccaccccactcttaatcag

SEQ ID NO: 524 - DNA, 245 bp, Homo sapiens
tgcaaaaccccactctgcatcaactgaacgcaaatcagccactttaattaagctaagcccttactagaccaatgggacttaaacccacaaacacttagttaacagctaagcaccctaatcaactggcttcaatctacttctcccgccgccgggaaaaaaggcgggagaagccccggcaggtttgaagctgcttcttcgaatttgcaattcaatatgaaaatcacctcggagctggtaaaaagagg

SEQ ID NO: 525 - DNA, 459 bp, Homo sapiens
  misc_feature 439: n = A,T,C or G
aaaattatttcttgaatctctccatacacaggcaaaaataagtgtgttacttaacatactggaaattgcctaacttaatcattgcctaaagaagagaaaattatccccaaaacgcgcttaaccaggaggccaatgcatttgccgacctccaagaacatggagatgaacgtgatagacagactgtccaccatctgaaccttcattcaccaccattcgataacccttattcaggcccagatcagcagcacatttcttgccaacaatcattaagtgtccaagaagactttcatcatcatcttctaccacagaaatctgggatatatgtttcttgggtatcaccagaaaatgtgttggtgcttgaggggaaatgtcatggaaagcaaggcaccggtcatcctcaaaaatgattttggctggtatttccttgcggatgatcttnccaaagatcgtgtcgccacc

SEQ ID NO: 526 - DNA, 368 bp, Homo sapiens
  misc_feature 97, 109, 131, 260, 266, 343: n = A,T,C or G
ccaaggccccttttgcagcccacggctatggtgccttcctgactctcagtatcctcgaccgatactacacaccgactatctcacgtgagagggcagnggaactccttangaaatgtctggaggagctccanaaacgcttcatcctgaatctgccaaccttcagtgttcgaatcattgacaaaaatggcatccatgacctggataacatttccttccccaaacagggctcctaacatcatgtcctccctcccacttgccanggaacnttttttgatgggctcctttatttttttctactcttttcaggcgcactcttgataaatggttaattcagaataaaggngactatggatataattgagccctct

SEQ ID NO: 527 - DNA, 418 bp, Homo sapiens
  misc_feature 45, 68, 76, 88, 95, 187, 235, 240, 242, 246, 269, 274, 340,363, 377, 379, 382, 394, 405, 409: n = A,T,C or G
gtacaagcttttttttttttttttttttttttttttttcaggctngttttattttaatggctgatctntgtaatcncagaggccagtntgtacanacaaagtgggaggttttatttcttggtctcttcctccttggataaagtcttgatgatctcctccttcttggcctggaggcgctcttcacggngcttgcgtgcttccttggtcttaaacctgcgggcctcaacctggtcanccagnancttnttgcgggccttgtctgccttcancttgnggatgtgttccatgaaaatccgcttgtttttgaacacattccccttcaccttcaggtacaggctgngatacatgtggcgatcgatcttnttaaattcacggtntnttntgagcagccggngcaaaatcctnattntcctcatcc

SEQ ID NO: 528 - DNA, 477 bp, Homo sapiens
  misc_feature 385: n = A,T,C or G
ccatttttcctgaatgacatcaattatgtcatctgtaaaatctccctgaatgataatttcatcctcccctgttactgaggcaccacaggagaatttttgagcaaaaaatctttgtgcttctttaagatcaatttcaaaagttgcaaggccacatactcttgtcacatatttcttctttgctctgggaattttggctatagtaaccttttgtggtacggtcttctttttttgttttatttgaccccttccacctctcttctgttttttcttctcctcttcttcccctgctgttccttgaccctcactaattccagcttcttgtttgggtgaattttctacagtaagttttgcaaattcatttggaaaattcttctctaaccattgnctacatttagcaacatcaggcatatattcacagtactctgttggtaatgaacagactccacaataaaggactcgaagtgggtaatcggcatc

SEQ ID NO: 529 - DNA, 217 bp, Homo sapiens
agaaattgagatgccccccaggccagcaaatgttcctttttgttcaaagtctatttttattccttgatatttttctttctttttttttttttttttggatggggacttgtgaatttttctaaaggtgctatttaacatgggaggagagcgtgtgcggctccagcccagcccgctgctcactttccaccctctctccacctgcctctggcttctcagg

SEQ ID NO: 530 - DNA, 479 bp, Homo sapiens
aaaactgataataatgctgaattatcttaagtgagatgttaagcccactttgttcttttaatgtaatggagcttatgggtagaagaccatgtctactaattacaaaaaaaaaaaaaaaaccatgcattactgcttttcctaccacttccagtaagaaaatgggtgttttgaagaaatcatttgccttgtcctcacggaatctgattaagccctggcctcttgattgtatagagtcattgtgtatattccagttacctagatattcccttgagattttgatacaatttgagggaggcagaagtctgcagttgaagaaaaaaaataagtctgtttgtcatatttaagtagcctgtggctatttttatactgattttgatatcatgttcttttcatagtcgtattttgccaccgtaaacataaaaaaaaaaaaaagatttccaaaatgccgttttcagaacctgggttttaatagcagtatt

SEQ ID NO: 531 - DNA, 344 bp, Homo sapiens
ctgtccaatgacaacaggaccctcactctactcagtgtcacaaggaatgatgtaggaccctatgagtgtggaatccagaacgaattaagtgttgaccacagcgacccagtcatcctgaatgtcctctatggcccagacgaccccaccatttccccctcatacacctattaccgtccaggggtgaacctcagcctctcctgccatgcagcctctaacccacctgcacagtattcttggctgattgatgggaacatccagcaacacacacaagagctctttatctccaacatcactgagaagaacagcggactctatacctgccaggccaataactcagccagtgg

SEQ ID NO: 532 - DNA, 229 bp, Homo sapiens
ctgatattagtagctttgcaaccctgatagagtaaataaattttatgggtgggtgccaaatactgctgtgaatctatttgtatagtatccatgaatgaatttatggaaatagatatttgtgcagctcaatttatgcagagattaaatgacatcataatactggatgaaaacttgcatagaattctgattaaatagtgggtctgtttcacatgtgcagtttgaagtattt

SEQ ID NO: 533 - DNA, 516 bp, Homo sapiens
ctaccctgccactggcccctatggcgcccctgctgggccactgattgtgccttataacctgcctttgcctgggggagtggtgcctcgcatgctgataacaattctgggcacggtgaagcccaatgcaaacagaattgctttagatttccaaagagggaatgatgttgccttccactttaacccacgcttcaatgagaacaacaggagagtcattgtttgcaatacaaagctggataataactggggaagggaagaaagacagtcggttttcccatttgaaagtgggaaaccattcaaaatacatgtactggttgaacctgaccacttcaaggttgcagtgaatgatgctcacttgttgcagtacaatcatcgggttaaaaaactcaatgaaatcagcaaactgggaatttctggtgacatagacctcaccagtgcttcatataccatgatataatctgaaaggggcagattaaaaaaaaaaaagaatctaaaccttacatgtgtaaaggtttcatg

SEQ ID NO: 534 - DNA, 123 bp, Homo sapiens
ctggtggcttccctgcatgtcagggctcttcgacagatcatgggccacttcgaggggctcgggaaggggtacgctgtgtccgtcgagcaccgggatgcccaccaccggcgcccggtgcatcag

SEQ ID NO: 535 - DNA, 503 bp, Homo sapiens
  misc_feature 390: n = A,T,C or G
ccagttttatccgagactctaaataagcaccgagctgataatcggattgtagagcgttgttgcaggtgcctgcgctttgctgttcgctgtgtaggcaaaggatctgcagcactgctgcagccactagtcacacagatggtgaatgtgtaccacgtacatcagcattcctgcttcctgtaccttggcagtatccttgtggatgaatatggcatggaagaaggctgtcggcagggactgctagacatgctccaggcactgtgcatccccacctttcagctcctagaacagcagaatggtctccagaatcaccctgacactgtagatgacctgttccggctagccaccaggtttattcagcgtagccctgtcaccttgctgcggagccaagtngtcatccctatcttacagtgggccattgcctctactaccctggaccaccgggatgccaattgtagtgtcatgaggtttctacgagacctcattcatacaggggtagccaatga

SEQ ID NO: 536 - DNA, 364 bp, Homo sapiens
  misc_feature 337: n = A,T,C or G
ggctactgggggaacaagatcggcaagccccacactgtcccttgcaaggtgacaggccgctgcggctctgtgctggtacgcctcatccctgcacccaggggcactggcatcgtctccgcacctgtgcctaagaagctgctcatgatggctggtatcgatgactgctacacctcagcccggggctgcactgccaccctgggcaacttcgccaaggccacctttgatgccatttctaagacctacagctacctgacccccgacctctggaaggagactgtattcaccaagtctccctatcaggagttcactgaccacctcgtcaagacccacaccagantctccgtgcagcggactcaggctccag

SEQ ID NO: 537 - DNA, 273 bp, Homo sapiens
ctgggcctgaagctgtagggtaaatcagaggcaggcttctgagtgatgagagtcctgagacaataggccacataaacttggctggatggaacctcacaataaggtggtcacctcttgtttgtttagggggatgccaaggataaggccagctcagttatatgaagagaagcagaacaaacaagtctttcagagaaatggatgcaatcagagtgggatcccggtcacatcaaggtcacactccaccttcatgtgcctgaatggttgccaggtcag

SEQ ID NO: 538 - DNA, 339 bp, Homo sapiens
  misc_feature 266: n = A,T,C or G
cctcctgcactccgcccggacccccggccccgccgtggctatccagtcagttcgctgctattcccatgggtcacaggagacagatgaggagtttgatgctcgctgggtaacatacttcaacaagccagatatagatgcctgggaattgcgtaaagggataaacacacttgttacctatgatatggttccagagcccaaaatcattgatgctgctttgcgggcatgcagacggttaaatgattttgctagtacagttcgtatcctanaggttgttaaggacaaagcaggacctcataaggaaatctacccctatgtcatccaggaacttagaccaacttt

SEQ ID NO: 539 - DNA, 179 bp, Homo sapiens
caaagtggtacagaccaagtatgtggaagccaaggactgtctgaacgtgctgaacaagagcaacgaggggaaagaattactcgtcccactgacgagttctatgtatgtccctgggaagctgcatgatgtggaacacgtgctcatcgatgtgggaactgggtactatgtagagaagacag

SEQ ID NO: 540 - DNA, 342 bp, Homo sapiens
  misc_feature 229, 284: n = A,T,C or G
ccacttggcccaggtagaagtagatgaagtgtttggtttcatgtgtcacataactaccgaagttcctccccacgatgcaatgccaggtgggattgtacttcttgtcaaattccttcttgatatgagccgcaatgtccttctctatgttgtatttctccagcgcctgagtagcgcactccaccgagtcctgttgcatctcttccgacatgtccgcatttttgatcacggnctttcggtcgcacttggttaccgtggagaaggggctggccgactgcaacggtctnctgggggaggtgctagcacagctcaagcccggctagagctaccgtcgctaccgaaaca

SEQ ID NO: 541 - DNA, 422 bp, Homo sapiens
  misc_feature 332, 334: n = A,T,C or G
caacagaataaatacttttatagtagttttataatcctgaaattcgaaagctttcccaattgcacttgcatctaaacaaaactgttgcagtttttactctatttattttgttccccatgtttatgaaagtcctgcacagtttcaaaggcatggtaaataatatatcaatgtttatgtagtctgttacagaaacagctatagataacattatccagtgaagagcaaaattcaagctttagaaaatattcatgcatgcaattttgacatatctaaaaataggtttttgtatatttatggtgggaggtggttgggaacttttaacaaaatggggngntaatttttgtacagtctgtgggcatttacacatttttaatgtattaaaatttggtaattatgtgtacattaaattaataaaagttact

SEQ ID NO: 542 - DNA, 262 bp, Homo sapiens
ctgacaacgaaggccgcgcctgcctttcccatctgtctatctatctggctggcagggaaggaaagaacttgcatgttggtgaaggaagaagtggggtggaagaagtggggtgggacgacagtgaaatctagagtaaaaccaagctggcccaaggtgtcctgcaggctgtaatgcagtttaatcagagtgccatttttttttttgttcaaatgattttaattattggaatgcacaatttttttaatatgcaaataaaaagttt

SEQ ID NO: 543 - DNA, 238 bp, Homo sapiens
ctggagacactttagaactctttccccatcctccaccatagtgcaaacttcacgcttctctgagcacctccaaggtatgcccttgaagtgaaacagaaaagggaagaaagggggctttttcttttccatttctgaccaaacagaggtctgaaatagcagtgtattatgaaattctcattccctgcaacagtcagccaccacttggaaaatggctatttttgccataaactagattttt

SEQ ID NO: 544 - DNA, 346 bp, Homo sapiens
ccaccctgaaaatcaggaactccaacttctacacggtggcagtgaccagcctgtccagccagattcagtacatgaacacagtggtgaattttaccgggaaggccgagatgggaggaccgttttcctatgtgtacttcttctgcacggtacctgagatcctggtgcacaacatagtgatcttcatgcgaacttcagtgaagatttcatacattggcctcatgacccagagctccttggagacacatcactatgtggattgtggaggaaattccacagctatttaacaactgctattggttcttccacacagcgcctgtagaagagagcacagcatatgttcccaagg

SEQ ID NO: 545 - DNA, 418 bp, Homo sapiens
ctgctactgagtaaggggcattcctgttacagaccaaggagaactggagaaagaaagagaaaatcagttcgtggttgcattgtggatgcaaatctgagcgttctcaacttggttattgtaaaaaaaggagagaaggatattcctggactgactgatactacagtgcctcgccgcctgggccccaaaagagctagcagaatccgcaaacttttcaatctctctaaagaagatgatgtccgccagtatgttgtaagaaagcccttaaataaagaaggtaagaaacctaggaccaaagcacccaagattcagcgtcttgttactccacgtgtcctgcagcacaaacggcggcgtattgctctgaagaagcagcgtaccaagaaaaataaagaagaggctgcagaatatgctaaacttttgg

SEQ ID NO: 546 - DNA, 492 bp, Homo sapiens
cgaattcttcaggatgatgttgcatgtgacatcattaaaataggttctttagtaaggaataaagagagatttgtaaaacgaagacaacggcttattggtcccaaaggatctacattgaaggcattggaactcttaactaattgttacattatggttcagggaaacacagtttcagccattggaccttttagtggcttaaaagaggttagaaaagtagtccttgatactatgaagaatattcatccaatttataacattaaaagcttaatgattaagagagagttggcaaaagattctgaattacgatcacaaagttgggagagatttttgccacagttcaaacacaaaaatgtgaataaacgcaaggaaccaaagaaaaaaactgttaagaaagaatatacgccattcccaccaccacaaccagaaagtcagatcgataaagaattggctagtggtgaatactttttgaaggcaaatcagaagaagcggcag

SEQ ID NO: 547 - DNA, 533 bp, Homo sapiens
  misc_feature 515: n = A,T,C or G
aaaagaaaaagatatacttgttttgccccttgacctgaccgacactggttcccatgaagcggctaccaaagctgttctccaggagtttggtagaatcgacattctggtcaacaatggtggaatgtcccagcgttctctgtgcatggataccagcttggatgtctacagaaagctaatagagcttaactacttagggacggtgtccttgacaaaatgtgttctgcctcacatgatcgagaggaagcaaggaaagattgttactgtgaatagcatcctgggtatcatatctgtacctctttccattggatactgtgctagcaagcatgctctccggggtttttttaatggccttcgaacagaacttgccacatacccaggtataatagtttctaacatttgcccaggacctgtgcaatcaaatattgtggagaattccctagctggagaagtcacaaagactataggcaataatggagaccagtcccacaagatgacaaccagtcgttgtgtgcggntgatgttaatcagcatgg

SEQ ID NO: 548 - DNA, 295 bp, Homo sapiens
ccatgtatgtgcatgcatatacactctacagtgctgttagaccttttggctgcagtttcatgttagggtcttacagtgtgaatgacggtgcgcaactctacatgattgacccatcaggtgtttcatacggttattggggctgtgccatcggcaaagccaggcaagctgcaaagacggaaatagagaagcttcagatgaaagaaatgacctgccgtgatatcgttaaagaagttgcaaaaataatttacatagtacatgacgaagttaaggataaagcttttgaactagaactcag

SEQ ID NO: 549 - DNA, 195 bp, Homo sapiens
tgctgttcgtgatatgagacagacagttgcggcgggtgtcatcaaagcagtggacaagaaggctgctggagctggcaaggtcaccaagtctgcccagaaagctcagaaggctaaatgaatattatccctaatacctgccaccccactcttaatcagtggtggaagaacggtctcagaactgtttgtttcaattgg

SEQ ID NO: 550 - DNA, 497 bp, Homo sapiens
ccacggggactgttattcgcaagctggttttctagacctgttagctggaagcatggtgagcaccatttctggacgctcaggccgtgtcgggcttcagtcatctccaccacacaggtacagcagcgctttctggtagtcgcccttagtgtcttgctggatataatagtacagggacttgccgtactttctcttgaattcagacctaattttcaacatgtccacttcactgcgggagaccatgattctgatcaggaccttatctcgcgtccccttgcccttcatggagtcatacagccgatcagcaaaatacaggggcttgttctgaatgcactgaaccaggttcaggaaagcattttccaggtctcctttaacctctttcctgatgctttccaacatgtcataagggctgtaactcttgtacctatcaaatactttctggaggtggggcacgctccgctcggtcatgatgctgatccacttgggaacatcagttcctt

SEQ ID NO: 551 - DNA, 496 bp, Homo sapiens
  misc_feature 223, 414: n = A,T,C or G
aaatgttttaggcaacctaaggacaaatgtaaaagtaaagatgcaggaaaaatgaattgcttggtattcattacttcatgtatatcaagcacagcagtaaaacaaaaacccatgtatttaacttttttttaggatttttgcttttgtgattttttttttttttttttgatacttgcctaacatgcatgtgctgtaaaaatagttaacagggaaataacttganatgatggctagctttgtttaatgtcttatgaaattttcatgaacaatccaagcataattgttaagaacacgtgtattaaattcatgtaagtggaataaaagttttatgaatggacttttcaactactttctctacagcttttcatgtaaattagtacacgtgttcttaacaattatgcttggattgttcanaacacgtgtattaaattcatgtaagtggaataaaagttttatgaatggacttttcaactactttctctacagcttttcatgt

SEQ ID NO: 552 - DNA, 422 bp, Homo sapiens
  misc_feature 247, 288, 355, 377, 410, 414, 420: n = A,T,C or G
aaatgttttaggcaacctaaggacaaatgtaaaagtaaagatgcaggaaaaatgaattgcttggtattcattacttcatgtatatcaagcacagcagtaaaacaaaaacccatgtatttaacttttttttaggatttttgcttttgtgattttttttttttttttttgatacttgcctaacatgcatgtgctgtaaaaatagttaacagggaaataacttgagatgatggctagctttgtttaatgncttatgaaattttcatgaacaatccaagcataattgttaanaacacgtgtattaaattcatgtaagtggaataaaagttttatgaatggacttttcaactactttctntacagcttttcatgtaaattantacacgtgttcttaacaattatgcttggattgntcanaacacntg

SEQ ID NO: 553 - DNA, 507 bp, Homo sapiens
  misc_feature 422, 436: n = A,T,C or G
cctaagaactcactggcatttgtttcaaggtaactgaacaagaagctgtttggaattggcagaagtcagataaaaaaccaatcttacatgccccttcttcctctcttgagctgttgtttatattcaaattaaatacacattgtttctctctgtagatacctatgtacttaatagattctagttagtaaactgcacatgcccaataactttgaggaaatttagtgaaaatgaagaaaaagagaaaatatttctctttagacctgaggttatgtttaggctggcccatagaaacaggtccagataaatttctaaaaaagcaaagtagatatttatgaatagtattcaatgcctaggattaacatctaaaatgactcagtagtactgctagccagccaataaaatataaactccatttgtcttanttatatagaactgngtttccagcttagaaaaagtcaaaccaatgacttttagaacaatctactctcattttttattcagcctcta

SEQ ID NO: 554 - DNA, 339 bp, Homo sapiens
cgcaggggcttctgctgagggggcaggcggagcttgaggaaaccgcagataagtttttttctctttgaaagatagagattaatacaactacttaaaaaatatagtcaataggttactaagatattgcttagcgttaagtttttaacgtaattttaatagcttaagattttaagagaaaatatgaagacttagaagagtagcatgaggaaggaaaagataaaaggtttctaaaacatgacggaggttgagatgaagcttcttcatggagtaaaaaatgtatttaaaagaaaattgagagaaaggactacagagccccgaattaataccaatagaagggca

SEQ ID NO: 555 - DNA, 515 bp, Homo sapiens
aaaaccaacaatgatgcctagtgagtatgtgtccacaggccataacagggtagaagagagacatcgtgcaacccaatgagtagtgaagggactgtgttgcttgtgaagcggtgtagtagcatttttgcagattcttggctgggtttagtgtactgatctagaaaagctgtttttctgctcctttgtggaaggcagttatgatcaggctgcatggacaaagcaggtagaggggcaccatcaggggctcttgcactattttcacctctaaatattacgtactcagtagtgccctgcttctagggctctgaatacgggcttaaagtcatcttgtcctgctggaatttgctgtgcagagccataagcctcccattttgttagcgtcagctaggccaataggaacagaccgggaccttgtctcacactgatgatacctcacatgttgaccggctatgtgaactgcctatttcctatgctggagttttgatttttaactaaacgcaaatctgtagattctc

SEQ ID NO: 556 - DNA, 207 bp, Homo sapiens
ctgtgccactcggccatctctgtatgtgactgtgatgttggacatctggcagttcatgttgtcctctgcttcaatgagcttcccccgatatacctcaccggtgttcgtctcacatgtcacaatgtggccctcggcctcatgcagtactttaatcggcacaccaatagacatcttggcaggaagagagttcggctctggcctactttt

SEQ ID NO: 557 - DNA, 491 bp, Homo sapiens
ggccgcccgggcaggtctggcagcgtctgatgtcgggcacagaggtgacaccgcagcgcttgtactgcccgtccccaatggagcgtgacacctctagcacgcccaaaacacgcccatccctgacgtttcctccagccttctgtatcctcatccgctcttcatactgagttggattatgctctttgctgaggcttaaggctgcatgtttttgactctcctcattataacgacacaagattgcccgactatctccgaggttggcaatataaagaatgttgtctacagccagaacacacgtggcagtggacccatctttccaggcaggcttctggctggaagcttgtttaaggaactcttcatcagtatgcttgaaagtgtccaaaaggcatctcttcacggttttctctacactgattacatctcctttaggaaattttctgattaagttttgatgcaaattctgtgcagcaaattttgaggctcgaattcct

SEQ ID NO: 558 - DNA, 511 bp, Homo sapiens
  misc_feature 408, 499: n = A,T,C or G
ctgcctataaaactagacttctgacgctgggctccagcttcattctcacaggtcatcatcctcatccgggagagcagttgtctgagcaacctctaagtcgtgctcatactgtgctgccaaagctgggtccatgacaacttctggtggggcgagagcaggcatggcaacaaattccaagttagggtctccaatgagcttcctagcaagccagaggaagggcttttcaaagttgtagttacttttggcagaaatgtcgtagtactgaagattcttctttcggtggaagacaatggatttcgccttcactttcctgtccttaatatccactttgttgccacacaacacaatggggatgttttcacacactcgtaccagatctctatgccagttaggcacattcttgtaagnaactctcgatgttacatcaaacattatgatggcacactgggcttggatataatagccatctctcagtccaccgaatttctcctggccggcngtgtcccataca

SEQ ID NO: 559 - DNA, 301 bp, Homo sapiens
  misc_feature 198, 253, 263, 279: n = A,T,C or G
ccatgttcttcagaaagaacatgcctggctttttcacgatttgatcagtcttcttagaccctgaaccccaccatgaaatggcttccccagacacaacccgagagagttatgctttgtttctcagctaaaatattttgcagatcttaatttcctgggtcattgcatcatttttttttttttttaaagactgagtttaanaaataaattatcggccgggcgaggtggctcatgcctataatccaagcactttganaggccaaggngggtgggtcacaaggncaggagtttgagaccagcctgg

SEQ ID NO: 560 - DNA, 218 bp, Homo sapiens
ctgctgcagttcactggacaaggattcgccatcgacactgtgcttggccgcactggagaggatgaaactcagcactgccactgtggccttcacatcgcctgactcaaacttggcgtcagccgtgagcttcaggatcttctcataatcaatcccctgtcccagcagctcctttagtacctggctgcagagcagccgcaacttcacagaggacatcttgg

SEQ ID NO: 561 - DNA, 436 bp, Homo sapiens
aaaggcttaatggcaataatcaggggaggaagaagagtatgtttattttacataactgacggaaaaataaattcaacaaatagtaaatagaatttaatatggtctcatgcgccctgaaggaggtggtgcccgatttggaggggtaattgctatgtccaagtaatctcctatctggaacttctgcgactgcagggtcatggaatcatcagtcccctttctgccagacatggtgctgccaatctccttaactcgatagccaggtcttttaacatctgtaaaaacgattgcaaaattgaagtgagtgcccttctttctagcttctgggtagacttcttttactaagcttgtcagttctttcaaggttgcatccatccaagtgtagatctgcaactcgctggacggtacatttccccgggagaactcgtccattcggtgg

SEQ ID NO: 562 - DNA, 385 bp, Homo sapiens
  misc_feature 104, 254, 255, 317: n = A,T,C or G
ttggtcttgaactcctgacctcgtgatccatccaccttggcctcccaaagtgctgggattacaggtatgagccaccgcgcctggccttttttttttttttttanacaggttttggctctgtcacccaggctggagtgcagtggttcttaaacgggggtaattatgtcctccattcccgccaggagacacctggcaatgtctgggagacatttttggttattaccctgagagaggagagctccatgggcactganngggtagaggccggggtgctactaaacatcctacaatgaccaggacagcctcccacgacaaanaatcatccagccccaaatgtcagtagagccaggattccaaaaccctggtgttaggtataagaattgac

SEQ ID NO: 563 - DNA, 409 bp, Homo sapiens
  misc_feature 260, 355: n = A,T,C or G
gcacctttccccaacaggaacagagtcatccagccaatggggatgagtccccggggtcatcttacgtccctgcaggatgccatgtgcgagactatggagcagcagctctcctcggaccctgactcggaccctgactgaggatggcagctcttctgctcccccatcaggactggtgctgcttccagagacttccttggggttgcaacctggggaagccacatcccactggatccacacccgcccccacttctccatcttanaaaccccttctcttgactcccgttctgttcatgatttgcctctggtccagtttctcatctctggactgcaacggtcttcttgtgctagaactcangctcagcctcgaattccacagacgaagtactttcttttgtctgcgccaagaaga

SEQ ID NO: 564 - DNA, 390 bp, Homo sapiens
  misc_feature 245, 318, 334, 390: n = A,T,C or G
cctgggtgattgaggatgcaatgagctgtgattgtgccaccacactccagcctgggcaatacagcaagactgtctcaaaaaaaaaaaaaaaaacccaaaaaaactcaagaatgtaatgaatgatacccaatgtgccttttctagaaaaagttgccaaatatatctcttggatctgctgagcatgtcctctgatacataaggcaagcatgtttctacacccagtgttgatgccagttagttttcanaatccaaactgatggcagctactggtccttgggactgacatcctctgggaatataaccttctcttggactganatgctgctgccagctntaaaacagcactctgttctcaaaacctcatggcaggctcctggctccaatactcan

SEQ ID NO: 565 - DNA, 219 bp, Homo sapiens
ccaagaggaatcagaaacctgaagttagaaaggctcaacgagaacaagctatcagggctgctaaggaagcaaaaaaggctaagcaagcatctaaaaagactgcaatggctgctgctaaggcacctacaaaggcagcacctaagcaaaagattgtgaagcctgtgaaagtttcagctccccgagttggtggaaaacgctaaactggcagattagattttt

SEQ ID NO: 566 - DNA, 312 bp, Homo sapiens
  misc_feature 249, 307: n = A,T,C or G
ctgcctgcctgccagaggccaagcattcctaagcgtgggctgggggaggccctgcccctctgtagcagcagagcagacagggcagtgggagaaccatgtgggtaggagggcatcaggtctcaagagcctctcccctgctcaggactgggtctagacaaggccacgtgtgatagggtggtaagccctgggccatatggaggagcctggggcccatcttggttctgctgctgagttgctgggtggctttangcaagtcccttcttgtcccttggtcactctgtttcctggctagcactggcagcaaggnctcca

SEQ ID NO: 567 - DNA, 583 bp, Homo sapiens
  misc_feature 457, 560: n = A,T,C or G
ctgcatttgggggagaggggtagggattatcttcaaagcaccccagctctcttgatgagaaggtcagaggtacactggtttgtattattgcgacatccataaggtgatctaggttgcttttccttcagcaagggctttatttatcagaaggacattacgcttgacctccaaatttggctgacaatttactgatgagattcataacctttgggttgctctggtattttgacatatttgctgggttctgagccacatcctggaaagccaccataacttctggatcctgcatggctgcaagaacctctggatcactaagaatttcattgagtccaggcattccagccattccaggcatgccccctcccattccaggtattcctccgggaaaattaccaggcattcccccaggaaagccacctggaaaagagccatactgagctcctgactgtcgtctggncttcttcctccctctgggctctctcatgctcttctcgagccttcttaactcgttctattctttctttgatctctcgctcttcacgtttttcgctcatactttnttccgatgttctgcaattttctg

SEQ ID NO: 568 - DNA, 265 bp, Homo sapiens
cctaagaatgcagacggggagaaaaaaaaccaaaaccaaaaaaaaagacacctctccaattgctgggagggcctgggaataggtgaagatcaaaccacagtgggagaagagggtaaagatgtgagcttcaagcgggtaatgggcaagccacacctcccagttcctaggagggaatcgccacggccgacttcagcattctcgtctttactaagacttacccatagagaactacagcaggaaaccgatttcttcattcattctcttt

SEQ ID NO: 569 - DNA, 251 bp, Homo sapiens
cgcgggacaccgggtgtagagggcggtcgcggcgggcagtggcggcagaatgttggctaccagggtatttagcctagttggcaagcgagcaatttccacctctgtgtgtgtacgagctcatgaaagtgttgtgaagagcgaagacttttcgcccccagcttatatggatcggcgtgaccaccccttgccggaggtggcccatgtcaagcacctgtctgccagccagaaggcactgaaggagaaggagaagg

SEQ ID NO: 570 - DNA, 305 bp, Homo sapiens
ctggagaaggacttcagcagcgtgaagaagtactgccaagtcatccgtgtcattgcccacacccagatgcgcctgcttcctctgcgccagaagaaggcccacctgatggagatccaggtgaacggaagcactgtggccgagaagctggactgggcccgcgagaggcttgagcagcaggtacctgtgaaccaagtgtttgggcaggatgagatgatcgacgtcatcggggtgaccaagggcaaaggctacaaaggggtcaccagtcgttggcacaccaagaagctgccccgcaagacccaccgagg

SEQ ID NO: 571 - DNA, 367 bp, Homo sapiens
  misc_feature 216, 219, 240, 273, 326, 347, 351: n = A,T,C or G
ctgaagatccgtaagagcaatcagatacctactgaggtcaggagcaaagctgaggaggtggtgtcatttgtgaagaagaatgttctagtaactgggggatttttcggaggctttctgcttggcatggcatcctaaggaagatgacctcatgttcattgttcctggttttttccagccagcagcctctacactccatcataggacatcgagtccctnctnctcttctcccatgccttcttncctgccatggcaaatctgagtggcttctctaancatctgctggtacaagtcaatgtggcaccatgagcttcatggtggcagaaganacaatagtccttactcttctnccantacaccccctacttgg

SEQ ID NO: 572 - DNA, 247 bp, Homo sapiens
atcaagggaagaaggaggaatgctggactggaggcccctggagccagatggcaagagggtgacagcttcctttcctgtgtgtactctgtccagttcctttagaaaaaatggatgcccagaggactcccaaccctggcttggggtcaagaaacagccagcaagagttaggggccttagggcactgggctgttgttccattgaagccgactctggccctggcccttacttgcttctctagctctctagg

SEQ ID NO: 573 - DNA, 274 bp, Homo sapiens; identical to SEQ ID NO: 406

SEQ ID NO: 574 - DNA, 497 bp, Homo sapiens
  misc_feature 418, 428, 430, 434, 484: n = A,T,C or G
aaagcaaaagaggatgtatgagcagcagcgggacaatcttgcccaacagtcattcaacatggaacaagccaattataccatccagtctttgaaggacaccaagaccacggttgatgctatgaaactgggagtaaaggaaatgaagaaggtatacaagcaagtgaagatcgaccagattgaggatttacaagaccagctagaggatatgatggaagatgcaaatgaaatccaagaagcactgagtcgcagttatggcaccccagaactggatgaagatgatttagaagcagagttggatgcactaggtgatgagcttctggctgatgaagacagttcttatttggatgaggcagcatctgcacctgcaattccagaaggtgttcccactgatacaaaaaacaaggatggagttctggtngatgaatttngnttgncacagatccctgcttcatagatttgcatcattcaagcatatcttgtaaanaaacacatattat

SEQ ID NO: 575 - DNA, 232 bp, Homo sapiens
aaatgagcgtaaaaggccctctaacctatgcaggtttccccattatgcatatagaaaatgctagtatgttttgctcacttcatatgtaacaggtgcccttatgttgtgctgtatcctgtgctttttctgtgggaccattccattcaggagcaaagagcaccatgattccaatcttgtgtgtgtttactaacccttccctgaggtttgtgtatgttggatattgtggtgtttt

SEQ ID NO: 576 - DNA, 324 bp, Homo sapiens
ctggcaattggtttctgtgatgagtcgggcatcatggctgacaacgatcacagcacccttgtattcattgatggcctcccctagagcatcaatagactctatgtccaggttattggttggctcgtccaagatgaggacatcaggttcccgacaggccagctcagcaaacacaactcgcgccttctgaccaccagagagtttgcagatctggatggtgtgggcgtgactctccaggccgaagcggcccaggcacttgcgggcatcctggtagggcaggttgaagccccgctgcaggtactcagtgggcgtctcctccatgcgcag

SEQ ID NO: 577 - DNA, 552 bp, Homo sapiens
ctgaccagcaccatggcggttggcaagaacaagcgccttacgaaaggcggcaaaaagggagccaagaagaaagtggttgatccattttctaagaaagattggtatgatgtgaaagcacctgctatgttcaatataagaaatattggaaagacgctcgtcaccaggacccaaggaaccaaaattgcatctgatggtctcaagggtcgtgtgtttgaagtgagtcttgctgatttgcagaatgatgaagttgcatttagaaaattcaagctgattactgaagatgttcagggtaaaaactgcctgactaacttccatggcatggatcttacccgtgacaaaatgtgttccatggtcaaaaaatggcagacaatgattgaagctcacgttgatgtcaagactaccgatggttacttgcttcgtctgttctgtgttggttttactaaaaaacgcaacaatcagatacggaagacctcttatgctcagcaccaacaggtccgccaaatccggaagaagatgatggaaatcatgacccgagaggtgcagacaaatgac

SEQ ID NO: 578 - DNA, 198 bp, Homo sapiens
cctgacagacagaagggcttggagattttttttctttacaattcagtcttcagcaacttgagagctttcttcatgttgtcaagcaacagagctgtatctgcaggttcgtaagcatagagacgatttgaatatcttccagtgatatcggctctaactgtcagagatgggtcaacaaacataatcctggggacatactgg

SEQ ID NO: 579 - DNA, 457 bp, Homo sapiens
ctgccttggagtcgccctcagcagagatgatggccgccttttctgttgctcagccttttccaccacaaatctggccctctctgcttcctgctgagccacctgtttggcttccaccgcttctgtgaactccttcccgaaggtcagatgtgtcaaggacacgtcatccaggatgagcccaaaggtggcggctcgctctgtaaggtcgtcgctcacctgcctggagaccagctctctctgggtgattagttctccagcatcaaagcgagccaccactgacttgaggatctcagttgtgatggacggcagcacacgctcatcatagtcctctccgatgctggtgaagatgcgaggaagctggctggcgacaggccggaagaggatgcgcagtgtgatgttgacattctgtaaatctttgctaccagtgatgactggcacattacgtggtcgagaacggcag

SEQ ID NO: 580 - DNA, 416 bp, Homo sapiens
  misc_feature 14, 118, 147, 150, 151, 202, 341: n = A,T,C or G
ctgatatctcctcntgctatcctcaaactgccactcttaactcttgaagtaaataaataatctttgctggcaggactatgctgaacctccttaggcactctctaattagatgtcctangtcctcccaattcttagtccttttatatntgnntttctccttctcttattccatttagtttttcaattcatacaaaaccgtatncaggccatcaccaatcattctatacaacaaatgtttcttctaacgtccccacaatatcaccccttaccacaagacctcccttcagcttaatctctcccactctaggttcccacgccgcccctaatcccgcttgaagcanccctgagaaacatcgcccattctctctccataccaccccccaaaaattttcgctgccccaacacttcaacactat

SEQ ID NO: 581 - DNA, 470 bp, Homo sapiens
ccaaagggccaaaacaattaagaacacagtttgtgtcaatgtggagttaactgcagaacagtggaaaaagaagtatgaaaaagaaaaagaaaaaaataagatcctgcggaacactattcagtggcttgaaaatgagctcaacagatggcgtaatggggagacggtgcctattgatgaacagtttgacaaagagaaagccaacttggaagctttcacagtggataaagatattactcttaccaatgataaaccagcaaccgcaattggagttataggaaattttactgatgctgaaagaagaaagtgtgaagaagaaattgctaaattatacaaacagcttgatgacaaggatgaagaaattaaccagcaaagtcaactggtagagaaactgaagacgcaaatgttggatcaggaggagcttttggcatctaccagaagggatcaagacaatatgcaagctgagctgaatc

SEQ ID NO: 582 - DNA, 244 bp, Homo sapiens
cgagatcgtgccactgcactccagccttggcgacagactaagacgctgtctcaaaaaaaaacaaaaacgacaaaaaaaaacaaaacagaaaaaataaactaaggcaatgacagtccctggcaaatgctgggagggaggcagcagtggtcagggaaggtaaccctgaagcaggacttgtaaagcaaataagattgggaggccaaggtgggtggatcacgaggtcaggagttcgagaccggcctgg

SEQ ID NO: 583 - DNA, 422 bp, Homo sapiens
ctgggtttcaccaccaacctcagtgcctaccagagcgtgcaggagacctggctggccgccctgatcgtgttggcggtgcttgaagccatcctgctgctgatgctcatcttcctgcggcagcggattcgtattgccatcgccctcctgaaggaggccagcaaggctgtgggacagatgatgtctaccatgttctacccactggtcacctttgtcctcctcctcatctgcattgcctactgggccatgactgctctgtacctggctacatcggggcaaccccagtatgtgctctgggcatccaacatcagctcccccggctgtgagaaagtgccaataaatacatcatgcaaccccacggcccaccttgtgaactcctcgtgcccagggctgatgtgcgtcttccagggctactcatccaaagg

SEQ ID NO: 584 - DNA, 210 bp, Homo sapiens
ctggaagatgtcactgagtttgaaatcacaccagaaggaagaaggattactaaattagatcagattttgctaaatggaaataatataacaatgctggttcctggaggagaaggacctgaagtgtgaatgagtttccttgacttacactagattttgttttggcttataatgacaagaaaatggaattttttttcccactttctaatgttt

SEQ ID NO: 585 - DNA, 214 bp, Homo sapiens
aaaaagctagacacagtaaagacgtggttgggtttctgaaggcttataatggaaatagtctctagtctccagtcaggtaacatgccgcggtatgacactcccataagaacccccacccccctgccacccacttagtgtttttactcataaaaatgaggggaaaacttttctacatcagacaaatcacacagaggaaatattcacatgcagcttt

SEQ ID NO: 586 - DNA, 644 bp, Homo sapiens
aaattatttccatagtcttaaaaaatatgtaatgtcagaatgcatataaaaagaatgtaaaaggaaacctaaaatacaaatggaataatgtaacaaataaatatttgatttcagtaactgttaataatcagctcaacaccaccattctctctaaactcaatttaattcttataggaataatgaactgtcaaatgccatggcataattatttatttccaagctatcatcaatgattagaactaaaaaaattttggcataaaaaaatcacaattcagcataaataaagctatttttagcttcaacactagctagcatctctaagaattgttgaaataagtactataaccttgaaaattttcgacctggtgtctagtgttaagtgaaagtaatgcattttttttaagtgaaaagcttcttacattatttcacagacagtattacccaccccacattatgaatagttagatatattttatgtactttatacccacatgtatgacgcatgacatttggttcctgtagtacagatcacaatgttgttttcctgaatgggaaaaacttaaaaaaaaaaaaaaaaagggaagtgtacctgtgcacatttcaagatagcagcactcagtccatgccctattatccatcttaaa

SEQ ID NO: 587 - DNA, 162 bp, Homo sapiens
ctggcaagtccacaagccctgctggggccctgcttgttggcctgacccctccctcaccaggcagccagccaaggtggttcctgcttcacccactcagtcatcagcctcaggctgcccaaaatgcctctgacaccagatttatatcttctgggcggcttcttt

SEQ ID NO: 588 - DNA, 438 bp, Homo sapiens
ccagggtgccacaaacccaaagcaaagtttcaaaataatataaaatttaaaaagttttgtacataagctattcaagatttctccagcactgactgatacaaagcacaattgagatggcacttctagagacagcagcttcaaacccagaaaagggtgatgagatgagtttcacatggctaaatcagtggcaaaaacacagtcttctttctttctttctttcaaggaggcaggaaagcaattaagtggtcacctcaacataagggggacatgatccattctgtaagcagttgtgagggggtagagatgggacaaaattttggtctcagaggtcttaccatcttaatttggtaacttctaatgaaaaaaataaaaaatagaaataacattatccaaagatatcttaaagctgaaaacttgaacagcacattttttgttttt

SEQ ID NO: 589 - DNA, 150 bp, Homo sapiens
ctgttgcagcatccagttcatcttaagaatgtcaacgattagtcatgcaataaatgttctggtttttgcgctatctcagcagacctcacttgccccatggccttcatggcgcgctccaggcctcagacccttctctgtgttccgtcctgg

SEQ ID NO: 590 - DNA, 99 bp, Homo sapiens
aaagaaatataacgtagaataccaagaatatttgcaaagcaaaaacaaatataaagctgaaattctcaaaaaattggagcatcagagattgatagaggc

SEQ ID NO: 591 - DNA, 363 bp, Homo sapiens
  misc_feature 257, 294, 306, 352, 354, 359: n = A,T,C or G
cctggccgccaggcagaatgacaccccaagccaggcgttcgaggggctggggcagctctcctaaaatgaccctctgccaatgacaccacaccctcagtcccttcacacagaacgcggtaatttctgtaacttgtttccttaccccccagaagcagcaatcaccccatcagcaaagttgccggcaggcagagctcccaatttgggctttcggtgtgcagcgctccgtgtctaaccagcacagggactgtcggtacctnctggggacggggacagggacaggccctcatgtccttncaccaaatcttncaaaggcccccgggaaaaagccgtcaatccgggaacagccaccttntngcctnctgg

SEQ ID NO: 592 - DNA, 375 bp, Homo sapiens
  misc_feature 375: n = A,T,C or G
ctggttcaccacacggcgttctacctcatgtttgatggagcgggcgccatagtgcacattgtagccgtcgaccagcacatctgccacctcgcggtcccagagcagcgtgatgttgtgcctttgcttggctctcttggcccagaagtttagttccttgttgacgagttggatgagctccgagtggcagaagggggaggaagtagacgatctcattgatccgtcccagaaactcatccctccggaagtgagctttcaggatagggcgaatcacattctccttgaagttctttgagatggtgatcttgtcacttatctggacatcccccaggttttcggcaatacggttacggtcatctccaaagcttcctgcctcan

SEQ ID NO: 593 - DNA, 316 bp, Homo sapiens
  misc_feature 196: n = A,T,C or G
cctcgctgtgtgagcgccgagcactccaggtattttacagcaccaatctccttagccatggctagaccctgcggataggtgatgggagtcagcttcttctccttcagtttctcgatcgtgtctttatcatccctaagatcaagtttagttcccactaggatgatgggagtgttgggacagtggtgccgcacctcangataccactttgcacggacattttcaaatgatgcaggactcacaagggaaaagcaaattaagaacacatctgtttgcggataggatagggggcgtaatctgtcataatcttcttgtccag

SEQ ID NO: 594 - DNA, 475 bp, Homo sapiens
  misc_feature 345: n = A,T,C or G
gccgagccacatcgctgagacaccatggggaaggtgaaggtcggagtcaacggatttggtcgtattgggcgcctggtcatcagggctgcttttaactctggtaaagtggatattgttgccatcaatgaccccttcattgacctcaactacatggtttacatgttccaatatgattccacccatggcaaattccatggcaccgtcaaggctgagaacgggaagcttgtcatcaatggaaatcccatcaccatcttccaggagcgagatccctccaaaatcaagtggggcgatgctggcgctgagtacgtcgtggagtccactggcgtcttcaccaccatggagaangctggggctcatttgcaggggggagccaaaaagggtcatcatctctgccccctctgctgatgcccccatgttcgtcatgggtgtgaaccatgagaagtatgacaacagcctcaagatcatcagcaatgcc

SEQ ID NO: 595 - DNA, 348 bp, Homo sapiens
ctgagtctgcttaaaaaatcatccaaagcagaccgactctcctacagctcggagctgtgtatcttattgccagtaccacaacagtcctgcccgaatatatcatcagcggcctactttctcccttccctccaagcctgttcctttcccaacaatacccgtctttgttccccggaatgaagaggggcttttcttcctgcacatcgctatttgataacagcgagtgcctccccatgcactggaatccactgtgtgtgctgtcgtgtctcctactggcctcttcgatctcagcaaaaccaaagtgctgtgctacctaattgcttttttcttttttcctttccactttctgtt

SEQ ID NO: 596 - DNA, 120 bp, Homo sapiens
ggcggctgggaccctgtacacgtatcctgaaaactggagggccttcaaggctctcatcgctgctcagtacagcggggctcaggtccgcgtgctctccgcaccaccccacttccattttgg

SEQ ID NO: 597 - DNA, 578 bp, Homo sapiens
aaacaaattgcagagaatagagaaaaaaataggttatttacagaaaacaatatctacatatgtacttagaggtacaaatttggtgacagaaaagacttcagtatatgctggcatcttagaagcagttctcaaagagcttagttttattttcttgaattttaagaatgcctaagatccttcttcatcctcgatcttgggagccaagtagtattttaagtgtcccatatccgcaattttatactctacaacaaggggtacatctgcagacatactgagtgtcaccgttgaagagagtggagtggcttttgtaaagaagttcaggtacctcagtgcaaaagttagttgaactggttcattcatctctatggtaacagcttcctcctctttatcgacattacttgtctgtgacaatttaatgtttccatttccaagttctccacttgcagaaaatttcactccgtcttttgcacaggaaattacaacagcatctccaatatggctgagatctcggcatatacgtgcaaattcaccagaaggcatctttactacacagtgacccacgatgcagtgcatgcaca

SEQ ID NO: 598 - DNA, 169 bp, Homo sapiens
ctgcttgccagcaaagatcagtctctgctgatcaggaggaattccttccttatcctggatcttggcctttacattttctatcgtatccgagggttcaacctcgagggtgatggtcttccccgtaagggttttcacgaaaatctgcattttggtggcggctccaccgcag

SEQ ID NO: 599 - DNA, 513 bp, Homo sapiens
  misc_feature 444: n = A,T,C or G
aaatgatttaagttcatttgttctcaaccttggggtaaactgaggtattttgcttcctgggaagatcttcgcaattttgagtgctcctgtggggagcggggatgagctaaagatacaatgtttccctgccccgcaccgcttccacaaaatagcaatgtggttttgcagctctgacttctgctcccagtaacccatcgttagggcactctagcactatggaggtacccaaggctcagccagtctctatttaagaaaatttaacaaatacgagtaaccctgtcccaatcactgaatctctagttactactcttagaaacacctgtggcttcttggccctcctgttgcccgctctgaatctctctgcagtctacaaaatcgccccagtcaactctccacttggagggaattgtccagtgtggcccctagaattgagtcaccccctanataccaactgtctgaccccgaggagctctgtaagtccctgctcctcctcttccctttggggctggtgct

SEQ ID NO: 600 - DNA, 395 bp, Homo sapiens
ccagggtgcttttggaaacatgtgtcgtggaggccgaatgtttgcaccaaccaaaacctggcgccgttggcatcgtagagtgaacacaacccaaaaacgatacgccatctgttctgccctggctgcctcagccctaccagcactggtcatgtctaaaggtcatcgtattgaggaagttcctgaacttcctttggtagttgaagataaagttgaaggctacaagaagaccaaggaagctgttttgctccttaagaaacttaaagcctggaatgatatcaaaaaggtctatgcctctcagcgaatgagagctggcaaaggcaaaatgagaaatcgtcgccgtatccagcgcaggggcccgtgcatcatctataatgaggataatggtatcatcaagg

SEQ ID NO: 601 - DNA, 309 bp, Homo sapiens
tgacagttgaattgacacttttattggggcagaatggaacagtccaagaatgtagatactgattctttctccataaatgttcttatagtgtgttcatcctagagttatttttttgtttgtttttttcctttttggatcttgattgataactgccatgatattttgctttgatgtgtttctacatgtagttgcacacggttcagtaaaaataatgctgctatcgagtatgcaaatattgaagtatgatggtttgactgtatggcagtgttgtagcagcctcttgtttttttccccattgcctcttttttt

SEQ ID NO: 602 - DNA, 562 bp, Homo sapiens
gagaagggcaggatcagaagggaccttggcacagcgacctcatcccccaagtggacacggtttgcctgctaactcgcaaagcaattgcctgccttgtactttatgggcttggggtgtgtagaatgattttgcgggggagtggggagaaagatgaaagaggtcttatttgtattctgaatcagcaattatattccctgtgattatttggaagagtgtgtaggaaagacgtttttccagttcaaaatgccttatacaatcaagaggaaaaaaaaattacacaatttcaggcaagctacgttttcctttgtttcatctgcttcctctctcaccaccccatctccctctcttccccagcaagatgtcaattaagcagtgtgaattctgactgcaataggcaccagtgcccaacacatacagccccaccatcatccccctctcattttataaacctcaaagtggattcactttctgatagttaacccccataaatgtgcacgtacctgtgtcttatctatattttaacctgggagactgttgtcctggcatggagatgaccatgatg

SEQ ID NO: 603 - DNA, 436 bp, Homo sapiens
  misc_feature 340, 410, 419: n = A,T,C or G
atttcctgtgctagagtccaatatttgagtctctcgtgcaaatgagactattctttgtggtacaattccacctatcatatgtgaaaactgcagtaaaaataaacccagatgctaaatcattcctacaaaggtttgactgaaactgtggcagatgtctcatcttctttatatgttaagcagcatactcttctgatttttattgcaatcttttaccaagtggtgcacaaacttggtattgatgtctttattccattttgagtttagattgagaatatttttattttctgaaggcagagatatctactgtataattgcaccaaagtacatttgaaaggaaggntttcaatagtgtaatactgcagcgatgtagataaaatcacaaatgtataatgtgttaggttgaataaggngtggaaaantgcttttctgttagtag

SEQ ID NO: 604 - DNA, 505 bp, Homo sapiens
cctttttggacaggtggtgtgtggtggccttggtatgtgctttctcgtgttacatcgcgccatcattggtatatggttagtgtgttggttagtaggaaaaaaaaagtattcagcaccatttgctcataggtctttcagagtttgttcttaaagtttctggaactttcctgtctgtaaagtaacaggaattactgagctacattggaaagcctctctgggacaggcagtggggagttaagcagtcatcataaaggaatcagtgtacattcagcatggtgacttgactacacaacaatcccttcccctctactgtagctcaagagagacatgcttctaaccactgaggtatgaggagtctcagactgttatttgctgttagaattggtcttcccagctaataacagtacatctctggcacagatgctattggtccttaatgtcctgtgattttaggaaatagtttggatttagttcaatttattcagaaaccaaacgtgtttaatta

SEQ ID NO: 605 - DNA, 417 bp, Homo sapiens
aaaaggtgactagacatacttggaagttcaaagcagtaggatgtagcttgcagggaaaagaaaacccttttccatgttgttaggcagaagtatatcaaatatatcccaattccacttgataaagtcagttggatgacctccttgaaccaatctagggcagaacacttagtaaaagcgggccctggtggggatgtgaatccaggagaagaggggcaccagatcccatgcagcgccaaacacatccattccaccctctaacacatacgaggcatgtcaccccatgtccctggacacaagatccacaagaacagtcagcagatggtcactgctcccacggcctggtgctttctaatggtcttaattcaggccatggagaaaatcctttaccaccaaacacaaactgtcattgaacttcag

SEQ ID NO: 606 - DNA, 258 bp, Homo sapiens
  misc_feature 225, 258: n = A,T,C or G
ctgactgttgagagagcagcacatcattttatcattttatcttctttggactacaggtggggtgggagggatttgggttggtggattaacagatggaattgaggagagagtaggatgctgattttcctacccgtggcccaggtctgtgccttccccatgccaaggactctaggtcaaatgtcaataaatatgaacctcgagaaagttctgaaggccatgaaatanaaaaaaaaaaaaaaaaaaaaaaaaaaaaagctn

SEQ ID NO: 607 - DNA, 92 bp, Homo sapiens
  misc_feature 76, 78, 83, 85, 87: n = A,T,C or G
aaataaaagtccagctataaggaagcagtctgtgcagtgtgtgggtgagtggatgggaacgtgtgtgtgtggtgtntntggtntntntgtgt

SEQ ID NO: 608 - DNA, 489 bp, Homo sapiens
aaagaatcagcaaaatttcaaataaaaaattatgaaaatattatcctcattagttcatttagtcccatgaaattaattattttctctgcttgatcttggtggacagtttcatgaagctgtcagttagttcattaaagttttggaaattctcagacagtgcagtggtatcagaaacttgtattcaagagtacaggtcagagtcttcttttcttttctttttgagatggagtcttgctctgttgccagactggagtgcagtggtgcgatctgggctcactgcaatctccacctcccgggttcaagcgattctcctgcctcagcctcccgagtaactgggactacaggtgcgcgccaccaagcccagctcatttttgtatttttagtagagatggggtttcacgatgttggctaggatggtctcgatctctggtcagagtcttttctgtaaatatccttggtaaagaagcaattttagactgtagctgttgc

SEQ ID NO: 609 - DNA, 394 bp, Homo sapiens
cctcgggtgttggagggcaaaggtgacagcatcatggacagaggcaaagagatgcttcttggtgatggatgcatcgaagaagtgcccagcctcaagctggctgaccacagggctgtggcaggccgccatgtacacctccacctcaatctcccggaagtcatggaaaatattcttcaggctcttgaggcacacagtgtccacaaaggagagggcacccaggtccaggatgaggctgtggaagtctggctgaggcaggcccagggccttcagtgtggacccatctggggccttggagtcttcttgaccattggctgttgcatcttccatcttatctcctgagctcaccatcatcttgcagtcctcaacgttgttgctcctcatgtcttcaaggctg

SEQ ID NO: 610 - DNA, 234 bp, Homo sapiens
ctgaaaatccatcagtgccagcataccaatgaacctctattcaagtgtacccaggaaggatgtgggaaacactttgcatcacccagcaagctgaaacgacatgccaaggcccacgagggctatgtatgtcaaaaaggatgttcctttgtggcaaaaacatggacggaacttctgaaacatgtgagagaaacccataaagaggaaatactatgtgaagtatgccggaaaacattt

SEQ ID NO: 611 - DNA, 415 bp, Homo sapiens
  misc_feature 28, 56, 66, 67, 80, 124, 206, 211, 255, 257, 268, 275, 297,332, 348, 362, 370, 377: n = A,T,C or G
cttttttttttttttttttttttttttngaaaagtcatggaggccatggggttggnttgaaaccanntttggggggttcnattccttccttttttgtctaaattttatgtatacgggttcttcnaatgtgtggtagggtggggggcatccatatagtcactccaggtttatggagggttcttctactattaggacttttcgcttcnaagcnaaggcttctcaaatcatgaaaattattaatattactgctgttananaaatgaatgancctacanatgataggatgtttcatgtggngtatgcatcggggtagtccgagtaacgtcggggcnttccggataggccganaagtgttgtggganaaagttanatttacnccgatgaatatgatagtgaaatggattttggcgtaggt

SEQ ID NO: 612 - DNA, 307 bp, Homo sapiens
ccactttactaaacatgaaaatgttgcctatatgttgctccacagtgatggatctgcggttcttcatcatcacaatggcactgagaaacatcaggatctccacttctcttcagtcaaagtcacacgggttaccgtcttcgcgttgggtgggcagaccgtggcagagcggcggcagtttcctcacgagtaggaaggcagcagagagcagggccgacagaaggtagtaaggttgggcgagccatcgtgaaagtcgcggcaccgaatacacgagagcaattagaggtgccaagaccgccatcttttcggc

SEQ ID NO: 613 - DNA, 303 bp, Homo sapiens
ctgcctcccggcagtccaggaaaactgcaaaaaatgggaagtaaggtcctggcaggcagacccggcatgtagccgctggccatcttgaatcctagggcatgaagttgccccaaagttcagcacttggctaagcctgatgcctctggtttatcacaaagaataggatgggataaagaaagtggacacttaaataagctataaattatatggtccttgtctagcaggagacaactgcacaggtatactaccagcgtttggatattgatatatacatggcaaatctgaatattgttttatgagagg

SEQ ID NO: 614 - DNA, 282 bp, Homo sapiens
cctccagccaggagtgcatcaacgtgcttctgcagtacggctgccccgacgagtgcgtgtagtatctgttttatttgactgcagtctccttggtgcaaaaacaaaatgggaaaaataaggataactcagaatttcaaaaggaaatcacaaattcagctagtaatagcattttcagtacttttcgtaaactaagtaaatacacaaaatgttgatttttctgaccataagacatattttatgtccttttgccaaggtggatgtgttagtctcaggccctcctgg

SEQ ID NO: 615 - DNA, 468 bp, Homo sapiens
ccacaccttccaggcacttggcctgatgccccgccctggtgctctccccaggctccctcctcagcctcctgcccacccagggccctttactctcttctccctccagaccttcctctgacccttgctgaactggggtccctttgtgagtgtctcagtctagaggtacctccctccctggggggtctcagctcctggagtcgcaggcccttggggcccctctgtgagatctcaatgctgtctggggaccctaagagttttctcacctgttcagtctcatctaaccttccaatgtctgatgttcctgccaaattcctgcctgattctgggtccgtcctgacctccaaaggtcagcttggtgcttgaggtctccctgctcttggtggcagtggtagcagcaacagcagcagcagcagcagcagcagcagcagagacctctccactttcccttaacccctctgctgggtagag

SEQ ID NO: 616 - DNA, 319 bp, Homo sapiens
  misc_feature 313, 315: n = A,T,C or G
ccagataaggctgacttcagtgctgatgcaagttcctttttggtccttctctggtaggcgaaggcaatatcctgtctctgtgcattgctgcggttggtcaaaatgttgacaatggtgacctcatccacacctttggtcttgatggctgtttcaatgttcaaagcatcccgctcagcatcaaagttagtataggctttgacagacccatatgcacttgggggtgtagagtgatcaccctccaagctgagcttgcacaggatttcgtgaacagtagacattttgaaggaagctgggccgtgcgccgagagctganancgtc

SEQ ID NO: 617 - DNA, 406 bp, Homo sapiens
cctgcaccagctcttgggtggtaaacactctatagagctcctctggtgacgtcaggaaggtttccttaagagtgatcttacaagtggggattttgactccaacaggtctggcctgggtttttgaaggagcaggcttagccttgcgctcctcagttttcagtgctggctgccccactgggtctactgactctccattcattgtaggtaagatcatgccctgggtgaactctgttttgagggtgctgatgtaaattcccattgcttctcttagaagtttcaccccttcttccttcattaaggccacgagatttgtgtcaggctcatctttggcaaggctcacactaatctccacttcatccacgctgttttcatcagacaaattggggatctccacatgtcctttgta

SEQ ID NO: 618 - DNA, 485 bp, Homo sapiens
ccacagaagttgctgctgacgctctgggtgaagaatggaagggttatgtggtccgaatcagtggtgggaacgacaaacaaggtttccccatgaagcagggtgtcttgacccatggccgtgtccgcctgctactgagtaaggggcattcctgttacagaccaaggagaactggagaaagaaagagaaaatcagttcgtggttgcattgtggatgcaaatctgagcgttctcaacttggttattgtaaaaaaaggagagaaggatattcctggactgactgatactacagtgcctcgccgcctgggccccaaaagagctagcagaatccgcaaacttttcaatctctctaaagaagatgatgtccgccagtatgttgtaagaaagcccttaaataaagaaggtaagaaacctaggaccaaagcacccaagattcagcgtcttgttactccacgtgtcctgcagcacaaacggcggcgtattgctctg

SEQ ID NO: 619 - DNA, 386 bp, Homo sapiens
ccaattgaaacaaacagttctgagaccgttcttccaccactgattaagagtggggtggcaggtattagggataatattcatttagccttctgagctttctgggcagacttggtgaccttgccagctccagcagccttcttgtccactgctttgatgacacccaccgcaactgtctgtctcatatcacgaacagcaaagcgacccaaaggtggatagtctgagaagctctcaacacacatgggcttgccaggaaccatatcaacaatggcagcatcaccagacttcaagaatttagggccatcttccagctttttaccagaacggcgatcaatcttttccttcagctcagcaaacttgcatgcaatgtgagccgtgtggcaatccaa

SEQ ID NO: 620 - DNA, 445 bp, Homo sapiens
  misc_feature 351: n = A,T,C or G
aaatgccatgatccaggatggattttagatcttgttgaaagcagccacatccatggactgcacatagtcctcaaaagcagtgatctgctcctccagcatatctgttccaactttatcatcttcaactacacactgtatttgaagtttcttaattccgtatcccactggaactagtttagatgagccccagactaagccgtctgcttgaatgcttctgacgcactcctctaatttcgccatatctgtctcatcatcccaaggtttcacatctagtaagatggaagacttggcaacaagtgcaggttttttggctttctttgattcatattgtgcaagacgttcttcccttancctctttgcttcttcactttcctcctcatcatcagatccaaagaggtcaatgtcatcatcatctttactatctgtagctccacttcctgtagtg

SEQ ID NO: 621 - DNA, 362 bp, Homo sapiens
  misc_feature 300, 308: n = A,T,C or G
cctgctgggaacgggacttctaaaaggaactatgtctggaaggctgtggtccaaggccatttttgctggctataagcggggtctccggaaccaaagggagcacacagctcttcttaaaattgaaggtgtttacgcccgagatgaaacagaattctatttgggcaagagatgcgcttatgtatataaagcaaagaacaacacagtcactcctggcggcaaaccaaacaaaaccagagtcatctggggaaaagtaactcgggcccatggaaacagtggcatggttcgtgccaaattccgaancaatcttnctgctaaggccattggacacagaatccgagtgatgctgtacccctcaaggattt

SEQ ID NO: 622 - DNA, 352 bp, Homo sapiens
  misc_feature 20, 86, 141, 218, 242, 296, 301, 321, 337: n = A,T,C or G
cctgctgggaacgggacttnctaaaaggaactatgtctggaaggctgtggtccaaggccatttttgctggctataagcggggtctncgggaccaaagggagcacacagctcttcttaaaattgaaggtgtttacgcccganatgaaacagaattctatttgggcaagagatgcgcttatgtatataaagcaaagaacaacacagtcactcctggcggnaaaccaaacaaaaccagagtcatntggggaaaagtaactcgggcccatggaaacagtggcatggttcgtgccaaattncgaancaatcttcctgctaaggccnttggacacagaatccnagtgatgctgtaccc

SEQ ID NO: 623 - DNA, 377 bp, Homo sapiens
ccaaatgtgttacttgtgcaccaaagagttttttaaaaagagatttgcctacgggtgagcactgaagtatacattgtgccaatgtaattattgtcttggagaccttctagaacttgctaaatcatatagcaagaagagaatgagttcaggcccagtaaatctggtgagttaatttacatctgtgatactgccgtttttcccattaaatgtggttatggcaaagcattcttagggtaataaataaataaataaactttggacaatgcctttacttgtgccctatatacagaactattccatagaattttccaggatttcaagatactacacaaagaaaaaaactgtaaagcaatttggtcctttccaaatttcagcag

SEQ ID NO: 624 - DNA, 260 bp, Homo sapiens
ctcgtcgctgcagcgacacacgccctcgccgccgccatgactgagcagatgacccttcgtggcaccctcaagggccacaacggctgggtaacccagatcgctactaccccacagttcccggacatgatcctctccgcctctcgagataagaccatcatcatgtggaaactgaccagggatgagaccaactatggaattccacagcgtgctctgcggggtcactcccactttgttagtgatgtggttatctcctcagatgg

SEQ ID NO: 625 - DNA, 441 bp, Homo sapiens
ccactgcagatggaaacctctcagtgtcttgacatcaccctacccaggcggtgggtctccaccacagccactttgagtctgtggtccctggagggtggcttctcctgactggcaggatgaccttagccaagatattcctctgttccctctgctgagataaagaattcccttaacatgatataatccacccatgcaaatagctactggcccagctaccatttaccatttgcctacagaatttcattcagtctacactttggcattctctctggcgatggagtgtggctgggctgaccgcaaaaggtgccttacacactgcccccaccctcagccgttgccccatcagaggctgcctcctccttctgattaccccccatgttgcatatcagggtgctcaaggattggagaggagacaaaaccaggagcagcacagtggggaca

SEQ ID NO: 626 - DNA, 476 bp, Homo sapiens
ctggggccactgtcggcatcatgattggagtgctggttggggttgctctgatatagcagccctggtgtagtttcttcatttcaggaagactgacagttgttttgcttcttccttaaagcatttgcaacagctacagtctaaaattgcttctttaccaaggatatttacagaaaagactctgaccagagatcgagaccatcctagccaacatcgtgaaaccccatctctactaaaaatacaaaaatgagctgggcttggtggcgcgcacctgtagtcccagttactcgggaggctgaggcaggagaatcgcttgaacccgggaggtggagattgcagtgagcccagatcgcaccactgcactccagtctggcaacagagcaagactccatctcaaaaagaaaagaaaagaagactctgacctgtactcttgaatacaagtttctgataccactgcactgtctgagaatttccaaaac

SEQ ID NO: 627 - DNA, 607 bp, Homo sapiens
ccagaagataacattccatggtgaaggagaccaagaaccaggactggagccaggcgatattatcattgtgttagatcagaaggaccgtgctgtttttactcgacgaggagaagaccttttcatgtgtatggacatacagctcgttgaagcactgtgtggcttccagaagccaatatctactcttgacaaccgaaccatcgtcatcacctctcatccaggtcagattgtcaagcatggagatatcaagtgtgtactaaatgaaggcatgccaatttatcgtagaccatatgaaaagggtcgcctaatcatcgaatttaaggtaaactttcctgagaatggctttctctctcctgataaactgtctttgctggaaaaactcctacccgagaggaaggaagtggaagagactgatgagatggaccaagtagaactggtggactttgatccaaatcaggaaagacggcgccactacaatggagaagcatatgaggatgatgaacatcatcccagaggtggtgttcagtgtcagacctcttaatgggccagtgaataacactcactgctggcatttaatgtgcagtagtgaatgagtgaaggactgtaatca

SEQ ID NO: 628 - DNA, 278 bp, Homo sapiens
cctccgggtagaaggtgtgcatgtctccaccagtgtcatgtggcacctgcagatggcttctcgctggcacctgtcatgctctgcagacgtgcctggaaaagaagcttatgttgccttaaggtcatctttctcctttgagggagagtacagaagtcgtggcgacacccacagccaagccaggatcgttatctacgcgtgagcatgcagagcgggcgtgagatattcccgctgaatcaagctaaaaataacgcatccaagctgccgagttatgaaagcag

SEQ ID NO: 629 - DNA, 329 bp, Homo sapiens
ctgacagagacaccagcactcgctggaacatgaacgatgtgtcagagcgaatgtcatcttcaaggctccgtccatattgctgctggtaggtttggcttatgcgccggatctcctcaggggtccgggaggccaggatctcaattaggcagccctcatcagtgccggctcccttcatggcccttcgcagctcttgcacgtcatacagcaccgtgggcgtcatcatccccacaatcacctgctcgaagttgccactcagttctgacttcaggtcgtctatcaagtccctgccgatggtgctcttgtaggctgtcctgatctcctggcgctgg

SEQ ID NO: 630 - DNA, 465 bp, Homo sapiens
gcacggagatctcgccggctttacgttcacctcggtgtctgcagcaccctccgcttcctctcctaggcgacgagacccagtggctagaagttcaccatgtctattctcaagatccatgccagggagatctttgactctcgcgggaatcccactgttgaggttgatctcttcacctcaaaaggtctcttcagagctgctgtgcccagtggtgcttcaactggtatctatgaggccctagagctccgggacaatgataagactcgctatatggggaagggtgtctcaaaggctgttgagcacatcaataaaactattgcgcctgccctggttagcaagaaactgaacgtcacagaacaagagaagattgacaaactgatgatcgagatggatggaacagaaaataaatctaagtttggtgcgaacgccattctgggggtgtcccttgccgtctgcaaagctggtgcc

SEQ ID NO: 631 - DNA, 557 bp, Homo sapiens
ctggctaaacagatgattgggtacaatctagcgacaaaacaaactccaaaagaaggtgtgaaagttaacaaggtgatggttgctgaagccttggatatttccagagaaacctacctggcaattctgatggaccggtcctgcaatggccccgtgctggtgggcagcccctaggggggcgtcgacattgaagaggtggctgcttcaaacccggagctcatttttaaggagcaaattgacatttttgaaggaataaaggacagccaagctcagcggatggccgaaaatctaggcttcgttgggcctttgaaaagccaggctgcagatcaaattacgaagctgtataatctcttcctgaaaattgatgctactcaggtggaagtgaatccctttggtgaaactccagaaggacaagttgtctgttttgatgccaagataaactttgatgacaacgcagaattccgacaaaaagacatatttgctatggacgacaaatcagagaatgagcccattgaaaatgaagctgccaaatatgatctaaaatacataggactagatgg

SEQ ID NO: 632 - DNA, 324 bp, Homo sapiens
ccttggtgatgaggcccctcacagcttgtgcaatggcatccctgtcgataccaaacatcttcagcagctcagccggcttcccacttcttggtacccggttaactgccaggtgggtgacagtgatgccaggctcgcccactactgcactggacacagcctcaccaatgccaccttcataataatggtcctccacggtgaggatcctgcccttggtggcacgagcgctgtcgagaatgagttttctgtccaggggcttgatggtgaaggggtccagcacgcggatgttgatcctttctttcttcagcagttcggcagcggccaagg

SEQ ID NO: 633 - DNA, 534 bp, Homo sapiens
  misc_feature 528: n = A,T,C or G
ctgttagagtatttagagtcctgagataacaaggaatccaggcatcctttagacagtcttctgttgtcctttcttcccaatcagagatttgtggatgtgtggaatgacaccaccaccagcaattgtagccttgatgagagaatccaattcttcatctccacgaatagcaagttgcaagtgacgaggggtaatacgctttacctttaagtcttttgatgcatttcctgccagttcaagtacctctgcggtgaggtactccaggatggctgcgctgtacacagcggcagtcgcgcccacacgtccatgactggtcgtcctagattttaggtgtcgatgaatacggcccactgggaactgcaagccggctctctgcgagcgggaaaccgcctttgtcttggcctttccggagtcctttccagccttaccgccagccatttcgaattccgctgaagctcaagcaagcaaggcagagaaaaggctaatcggacccacggtgagatcccaccacctactccttcgtcgcaccgngacctg

SEQ ID NO: 634 - DNA, 500 bp, Homo sapiens
ctgactggttcctttaccaaggtttgcagagtaggttgtgtttgaacaccttctgtgggtctgtgtcatttccaagttgaagaatttcagccaaagagcaacatgtcacattgattaaagatggttaatgacacagaaacatttctgttaatactaagggaaaaggctgttcttttatttatttatttttcctgagtcctcacttttttcttctctgacaaatgtttgaaattcagtgaaataccaaaggagtcaaggatgaaggggacacaggatggaatcagaaaaaacataaatggaatccaggcagttctatgagacaacactgatatatctccttgataaagaaaaaatgtacagaatatttaatgagtctgtcttgccccaaaagggaaaaacacaagtagctaagccatttgcagagaggaaaaatgtcatggaaaaatgaaaaatctctctaatgtctatagcacatgaaatatctaagtaggtgggtgcag

SEQ ID NO: 635 - DNA, 547 bp, Homo sapiens
  misc_feature 499, 518, 527: n = A,T,C or G
aaaatcttattcaaaatattaaataatagtttcagatatgaaaaaattactgcaataaaacggttcaggggtatttccattgcgcttcccttccctattaggaaagtacactgtccgcccaagagacaggatggacggccttcttccagctctacataaagcgcaagcccactggctcacccgggtcctgcttaacatatattagggctatgttttctaaaaagctgtagtgacacttgtaagtcaaccatggttcaaatcacatatttacatattgatcaattctttatgatagaaagacagacataaatgaatcccatagtaaatactttccagttgccataaaaaacaaaaacaaagaaaacaagtgtgggggaaaaaaggtaattgtacacaaatatcctttatgtatacaaacaacttcattcaggtataattttaatttgaaagacctaggtacagtattatttaagtgataatgacccctaagatttattcnaatttactgtaaaataatnaacgaagtnaacgaatctgatataatttt

SEQ ID NO: 636 - DNA, 185 bp, Homo sapiens
gtcgaagcgaggacgtggtgggtcctctggtgcgaaattccggatttccttgggtcttccggtaggagctgtaatcaattgtgccgacaacacaggagccaaaaacctgtatatcatctccgtgaaggggatcaagggacggctgaacagacttcccgctgctggtgtgggtgacatggtgatgg

SEQ ID NO: 637 - DNA, 215 bp, Homo sapiens
ccaacctgcctctacagcgtccacagcgaacacagggctagacaagggaggagtttctcaaacggttttaatcggttctctccgcgtcacaagccatcgggtaaggcaacggaatgtgcgtggggtcccctgtggctccgcggtcacaatactgagcctggaattgctgttagcaaaatatacatttgcgtcaccataaaaaaccgcgccgccgc

SEQ ID NO: 638 - DNA, 350 bp, Homo sapiens
aaaaaagaaaagacagtgaacagaaactgctacctaaggattctagaggcaatgagacacagagtcctgtttttcaggacagaccgtattgcccaagcctctagcatttacggagcataaattaagaatcttgttttgccttgagtctcaccatgaaataatgacacggtagccacatttgctgagggcctaatatgtaccaggcattgtgctaagtagtttcatatccatgtctcatttattccgaacttttttcctcagggagagaaaaatcaattacagtcttgttcataggaaaaaccaaacttacaattttgggaaagcaagaacatgtacagtagaggaggagg

SEQ ID NO: 639 - DNA, 328 bp, Homo sapiens
aaagctttgaaaagctactacttttacttctaatacatccagatgaacacgatgtagcaatatcagcttgtattccagagaaatctcattagtttttctggtgatggaaccacttatccacgtctgttggtactgtgcaggcagattcacagggtggtggtaaagcatccacaatggctctggcagcatcaggatcacacttgaaggggctctcagacaaagttgtattcatgcaactgattccttttccattcgttttcttagtcactaatgctttccaatggtcatgagtgcttttaataatatcaatggcaaagtccttatcttt

SEQ ID NO: 640 - DNA, 453 bp, Homo sapiens
ccacaggtgcctgactaggagcccctaggtccccaggcttgagaaagggttaaaatagaacctccaggtagttttcttcctctacctccacatccccccaagactgaaaagagtcactaactctcttttcccaagccttttataaaactgcaggaacactgtggagatggttcctatctggggtccttttggggacatatgcctcagtcagtcattcagtgattgatccaaaattatttactgagtgcctacctactctgcgccaggctctctagcctctcactactgagttagggtgcaggcagaggctggggcagaatgtttacagccagtgccagcacaaggtagtaatctagtgacagagaacagggtgttatggggagcatatgagaggccatctatcccagcctgggtgatcctggagagtttcccagggttgtgatatgtggcagg

SEQ ID NO: 641 - DNA, 485 bp, Homo sapiens
cctgctgggcttggcaacgagggactcggcctcggaggcgacccagaccacacagacactgggtcaaggagtaagcagaggataaacaactggaaggagagcaagcacaaagtcatcatggcttcagcgtctgctcgtggaaaccaagataaagatgcccattttccaccaccaagcaagcagagcctgttgttttgtccaaaatcaaaactgcacatccacagagcagagatctcaaagattatgcgagaatgtcaggaagaaagtttctggaagagagctctgcctttttctcttgtaagcatgcttgtcacccagggactagtctaccaaggttatttggcagctaattctagatttggatcattgcccaaagttgcacttgctggtctcttgggatttggccttggaaaggtatcatacataggagtatgccagagtaaattccatttttttgaagatcagctccgtggggctggttttgg

SEQ ID NO: 642 - DNA, 276 bp, Homo sapiens
  misc_feature 1, 13, 16, 17, 267, 270: n = A,T,C or G
ncatgctacgcanagnnagatggcgcccgcgtaatggctgggaaagtggagatgacattggaaatcctcaacgagaaggaggccgacgagaggccagccgggaaggggcgggacgaacccaacatgaaccccaagctggacttaccaaatcgaccagaaacctccttcctctggttcaccaacccatgcaagaccatgaagttcatcgtgtggcgccgctttaagtgggtcatcatcggcttgctgttcctgcttatcctgctgctnttngtggcc

SEQ ID NO: 643 - DNA, 305 bp, Homo sapiens
cctgctagaatcactgccgctgtgctttcgtggaaatgacagttccttgttttttttgtttctgtttttgttttacattagtcattggaccacagccattcaggaactaccccctgccccacaaagaaatgaacagttgtagggagacccagcagcacctttcctccacacaccttcattttgaagttcgggtttttgtgttaagttaatctgtacattctgtttgccattgttacttgtactatacatctgtatatagtgtacggcaaaagagtattaatccactatctctagtgcttgacttt

SEQ ID NO: 644 - DNA, 517 bp, Homo sapiens
aaaagtattttctctacagagaatcttatcagctatacaaaaatctgtacagtttttatactgaagctagtattgagctgcacttgaattcacattcttagcaaaataattgcctgagcacacacacacattccacacgcatcattaaaggatagccatttattcttcatcttcatcctcttcctcctcatcttcatcttcttcttcctcctcctcctcctcatcttctggttcgttcttcttctttgagcctgttggcctgccagggcccttctttcctgcttcacttttgcccttggcacgatatgcagcaatatccttttcatatttctcctttagcttagctgctttctgttcatatggttgtttatctttggctgactgctcagaccacatttcacccaatttctttgcagtatccccaatggataggccagggtgttcacttttgatctttgggcgatgttcagagcaaaacaggaagaaggcagatggtggccttttaggagcattgggg

SEQ ID NO: 645 - DNA, 484 bp, Homo sapiens
ctgtatggagcctacctccgcatccacgcgcacttcactgggctcagatacctgctatacaacttcccgatgacctgcgccttcataggtgttgccagcaacttcaccttcctcagcgtcatcgtgctcttcagctacatgcagtgggtgtgggggggcatctggccccgacaccgcttctctttgcaggtcgaaaggggcaaggacccccttttgtccctttgatctttgtgggtggtcaggggtatgttggggattaaggcatgagggtcctgattgttagtgagggaagtcagtcctggctgctcagtagtttttcctccacaggttaacatccaaaaaagagacaattcccggaaggaagtccaacgaaggatctctgctcatcagccagggcctgaaggccaggaggagtcaactccgcaatcagatgttacagaggatggtgagagcccctgaagatccctcagggacagagggtcag

SEQ ID NO: 646 - DNA, 325 bp, Homo sapiens
aaaaaaataataaggtctcatggcttcattcagagaccacagtaacaacagcagcccaccaatcagagaagctggttgttattaaccaagctacagattcacactttctggcctaaaccctaatgggatgaggcttttcaccccaggccatgctggtggtgattttttagcccctaaataaaacactggactatttcctgtttacttcattgattgcaactacaaaggtggactcaaagcaaagcacaatcatgccagccaacattccagaattctgctgagaactccaagtctgtgaggggagaggttttacaagccagacagg

SEQ ID NO: 647 - DNA, 566 bp, Homo sapiens
  misc_feature 535: n = A,T,C or G
ctgtttcccatgggccaccaggcggctcaggacagcaaacgtctcatcccctctcaggatgtacttctccatgtcctgctcgatccactggtacatgaggcccttcacatgcacgtctcggatggcgtccgtcacgtccttgtagagatgtgcttggtcaaactccaggctgtggcccagaaagtagtccaccacacaggacggcagagccatctccggtagcgagaagatgtccatgaactgcttaatggagggacccttgccatagaagccactcatctggtatagtgggatgtgctgggtacccccatacagctcaatcacctcctcgtctggcacaggctggaggcccctgtaggctgtccccagacctgcccgggcaggtctgtttttttctggcagatctgatgctgatttgatgctgtatgatcttttttttttttttagttaaattcatttagtgaatgttctattattttatacatacacattaagtactcagctaagtaatggcactatgaggattttttttttntttcctgtcagcagcagttctgtgaatgcat

SEQ ID NO: 648 - DNA, 343 bp, Homo sapiens
ctgatcagcctatatgaagaaagaaaaggttatcattcagtccacgacatgtttggttgatttcaacataggttttccagttatacttttaatattgtgatctttcaaaaatcaatcttaaaatcctttgaaacctgtagcacggtcatttaatgaaagtaaatagaataaagaaaactccttatgctattttaacaaaggattacaaggaagtgacaacatctgctcacttcaagttttcttttctgggcccatggcttacagcttgctctgcgatctaactaggctaagttcatcatgtgaaaaatggcacctctagtggcagaaggccccttggcaccag

SEQ ID NO: 649 - DNA, 377 bp, Homo sapiens
ctgcagccgctgcagctactcctgctgtccgcaccgttccacagtataaatatgctgcaggagttcgcaatcctcagcaacatcttaatgcacagccacaagttacaatgcaacagcctgctgttcatgtacaaggtcaggaacctttgactgcttccatgttggcatctgcccctcctcaagagcaaaagcaaatgttgggtgaacggctgtttcctcttattcaagccatgcaccctactcttgctggtaaaatcactggcatgttgttggagattgataattcaaacttcttcatatgctcgagtctccagagtcactccgttctaaggttgatgaagctgtagctgtactacaagcccaccaagctaaagagg

SEQ ID NO: 650 - DNA, 469 bp, Homo sapiens
ccaagctgcaggggatttgggggatgtgggacctccaattcccagccccggcttcagctctttcccaggtgttgactccagctccagcttcagctccagctccaggtcgggctccagctccagccgcagcttaggcagcggaggttctgtgtcccagttgttttccaatttcaccggctccgtggatgaccgtgggacctgccagtgctctgtttccctgccagacaccacctttcccgtggacagagtggaacgcttggaattcacagctcatgttctttctcagaagtttgagaaagaactttctaaagtgagggaatatgtccaattaattagtgtgtatgaaaagaaactgttaaacctaactgtccgaattgacatcatggagaaggataccatttcttacactgaactggacttcgagctgatcaaggtagaagtgaaggagatggaaaaactggtcatacag

SEQ ID NO: 651 - DNA, 436 bp, Homo sapiens
  misc_feature 347, 436: n = A,T,C or G
aaaaaagtgacattgctttattactattggcaggtggggcctgcatgaggtggttagtgtgctcaggggatgggtgggctgtggagatgatgacagaaaggctggaaggaaagggggtgggtttgaaggccagggccaaggggtcctcaggtccgcttctgggaagggacagccttgaggaaggagtcatggcaagccatagctaggccaccaatcagattaagaaattctgagaaatctagctgaccatcactgttggtgtccagtttcttcatcatgcggtcaaggacaccagggtccttctggttctttgtgaaggcagctagttctgtattcatgaagcttangaactctgtcttggagagagtgtagttataaccatcctttccagcatacttctggaagacagcaatcagggactcgatgcaccgctcan

SEQ ID NO: 652 - DNA, 446 bp, Homo sapiens
ccagctcaatgctgacctccgcaagttggcagtcaacatggtccccttcccacgtctccatttctttatgcctggctttgcccctctcaccagccgtggaagccagcagtatcgagctctcacagtgccggaactcacccagcaggtcttcgatgccaagaacatgatggctgcctgtgacccccgccacggccgatacctcaccgtggctgctgtcttccgtggtcggatgtccatgaaggaggtcgatgagcagatgcttaacgtgcagaacaagaacagcagctactttgtggaatggatccccaacaatgtcaagacagccgtctgtgacatcccacctcgtggcctcaagatggcagtcaccttcattggcaatagcacagccatccaggagctcttcaagcgcatctcggagcagttcactgccatgttccgccggaagg

SEQ ID NO: 653 - DNA, 290 bp, Homo sapiens
ccactttgagcatctcatggtggccctagtgactccaccagcagtctttgatgcaaagcagctaaagaaatccatgaagggcgcgggaacaaacgaagatgccttgattgaaatcttaactaccaggacaagcaggcaaatgaaggatatctctcaagcctattatacagtatacaagaagagtcttggagatgacattagttccgaaacatctggtgacttccggaaagctctgttgactttggcagatggcagaagagatgaaagtctgaaagtggatgagcatctgg

SEQ ID NO: 654 - DNA, 467 bp, Homo sapiens
cacgagcacacagcacacaaacgcacagcacacacgcacacacagcacacacacgagcacacagcacacaaacgcacagcacacgcacacacatgcacacacagcacactagcacacagcacacacacaaagacacagcacacacatgcacacacagcacacacacgcgaacacagcacacacgaacatgcacacacagcacacacacataaaatgtgatacatatatatacacacacacacaaaatgtgatatatatatatgtgtatacacacacacacacacacacacacacacacacacacacacaccatggaatactactcagccataaaaaggaatgaaataatggcattcacagcaacttggatggaattgaagactattattccaagtgaagtaactcaggagtggaaagccaaacattgtatgttctcacccgtatatgggaaccaagctatgaggatg

SEQ ID NO: 655 - DNA, 286 bp, Homo sapiens
aaaacttttgttaagaaaaactgccagtttgtgcttttgaaatgtctgttttgacatcatagtctagtaaaattttgacagtgcatatgtactgttactaaaagctttatatgaaattattaatgtgaagtttttcatttataattcaaggaaggatttcctgaaaacatttcaagggatttatgtctacatatttgtgtgtgtgtgtgtatatatatgtaatatgcatacacagatgcatatgtgtatatataatgaaatttatgctgctggtattttgcatttt

SEQ ID NO: 656 - DNA, 304 bp, Homo sapiens
aaaaaagtttcctagccatgaagccctgctactgatttagacaaggtattatggtcattactttgtacccctatccttccaagcacttctggtacttcagtcgtttttactgatccaccaacacctaaagaggctatgctacagtctctagctaaatggaagacacattcatccttctccctctgactgctttgatcatcatttattgcatctcataactaattttctaaagtttggattgggacttttcaggtcctttttggagggcaaaggaagtgccagcttctctggggaacttgttttt

SEQ ID NO: 657 - DNA, 141 bp, Homo sapiens
atgatatgaaaaaccatcgttggtcgtggttgtagtccgtgcgagaataatgatgtatgctttgtttctgttgagtgtgggtttagtaatggggtttgtggggttttcttctaagccttctcctatttatgggggtttagt

SEQ ID NO: 658 - DNA, 430 bp, Homo sapiens
  misc_feature 400: n = A,T,C or G
ctgatgacccaggactgcgctctgccccatcacagccagcatgactgcttctctgagagaacttgcccatcaggggctgggacatgggggtgtgggtaaagacagggatgaaggatagaggctgagagaagaaggaagaatcagcccagcaggtatgggcatctgggaaacctccagcctcaagtgtgttggtaacatgaaaaagctctggggggtagttggatctgggtgtctggtccattgctggcagtggacattattcttgccctaagagacactgccttttcagcagcagatactggtgagatgggggtggctcaggctgttcttcctcctcctagaatgtctggagctgtttctacattcagatactggtcccctatcacaaggctactggctnataggaattccctcctggtgccaccactgg

SEQ ID NO: 659 - DNA, 507 bp, Homo sapiens
ctggatctgggattattgtttcactaccaggtttccagccagcagggcagacttctccgtgtttgtcagtgtactggaatgcttgaaccaaacgtagtgtctcatccactgatctacccacaggaagatcattcagagtaatttgtcttaggattcctttgtcatcaataatgaagagacctctaagagtgtggcctgagtcctctaggtatacaccatagtcctttgagatctgatgggtcaaatctgaaagaagtggaatccttattggcccaagtcctccttgtcttcgaggggtattaatccaggccaaatgggtaaactgtgaatcaacagagcatgctaccacttcagtatttatagatctgaattcttcaagtctgtcgccaaaagcgataatttcagttggacacacaaatgtgaaatcaagtgggtagaagaagaaaaccaagtatttcccacgataatcagttaacttcagctccttaaattctccatcgatcacag

SEQ ID NO: 660 - DNA, 447 bp, Homo sapiens
ctgccaacatgccatccagactgaggaagacccggaaacttaggggccacgtgagccacggccacggccgcataggcaagcaccggaagcaccccggcggccgcggtaatgctggtggtctgcatcaccaccggatcaacttcgacaaataccacccaggctactttgggaaagttggtatgaagcattaccacttaaagaggaaccagagcttctgcccaactgtcaaccttgacaaattgtggactttggtcagtgaacagacacgggtgaatgctgctaaaaacaagacgggggctgctcccatcattgatgtggtgcgatcgggctactacaaagttctgggaaagggaaagctcccaaagcagcctgtcatcgtgaaggccaaattcttcagcagaagagctgaggagaagattaagagtgttgggggggcctgtgtcctgg

SEQ ID NO: 661 - DNA, 471 bp, Homo sapiens
ctgatttcccgaagccactactcccccatctacctgtcgtttgtcatgcttttggctgccctgagctggcagtacctgaccactctctcccaggtaacagaagactatgttcagactggagaacactgatcccaaatttgtccatagctgaagtccaccataaagtggatttactttttttctttaaggatggatgttgtgttctctttatttttttcctactactttaatccctaaaagaacgctgtgtggctgggacctttaggaaagtgaaatgcaggtgagaagaacctaaacatgaaaggaaagggtgcctcatcccagcaacctgtccttgtgggtgatgatcactgtgctgcttgcggctcatggcagagcattcagtgccacggtttaggtgaagtcgctgcatatgtgactgtcatgagatcctacttagtatgatcctggctagaatgataattaaaagta

SEQ ID NO: 662 - DNA, 546 bp, Homo sapiens
ctgatccgggactgcaataacaatgtccagagtatgcgacggacagaggagctaatctacctgagccagaagattgagtttgagtgcaaaatattcccgctcatttctcagtcacgctggctggtgaaaagtggggagctgacagccttggagttcagtgcttccccagggctacgaaggaagctgaacacgcgtccagtccacctgcacctcttcaatgactgtctgctgctgtctcggccccgagagtcagtgactggagtggcaggccagggcacaagaggggaaggggatgaggaaagaggggggtctgaaagggagagagaagggtcatgttcctagaagagcccttctcaatggcttaacccatagagcccaggtcatagcctagagaagagaaaaacaagcccaaagcaaaaaggggatcccatcaaactgtatcatgagaccacatagcaggacatgtaatatggtatagacacagagcaaaatgtagcaaattagcttatcacattctcacatgagtctatttgtggcttctttgga

SEQ ID NO: 663 - DNA, 508 bp, Homo sapiens
gtttccgggaggcgcgtggggcttgaggccgagaacggcccttgctgccaccaacatggagactttgtaccgtgtcccgttcttagtgctcgaatgtcccaacctgaagctgaagaagccgccctggttgcacatgccgtcggccatgactgtgtatgctctggtggtggtgtcttacttcctcatcaccggaggaataatttatgatgttattgttgaacctccaagtgtcggttctatgactgatgaacatgggcatcagaggccagtagctttcttggcctacagagtaaatggacaatatattatggaaggacttgcatccagcttcctatttacaatgggaggtttaggtttcataatcctggaccgatcgaatgcaccaaatatcccaaaactcaatagattccttcttctgttcattggattcgtctgtgtcctattgagttttttcatggctagagtattcatgagaatgaaactgccgggctatctgatgggttagagt

SEQ ID NO: 664 - DNA, 409 bp, Homo sapiens
aattaacagtgcgtatttgcctgaagaaggtcagtgtgcttgcttggagatcaggacgcaaaggtcaccatcagaaaagctaagtttgctgtatagtgaggatcaggagatctgatcctgattgcagaaccttccctgattacagaatcttgggttgtatctcccacttcacccttctagaccatcccagaagatctataagatttcatctgggaaatcactaggagttcttggaagggaaagaaggaagattgttggttggaataaaaacagggttgaatgagttccagaaagcagggttctcaacctcgtggacagcaatctgcagaagaagagaacttcaaaaaaccaactagaagcaacatgcagagaagtaaaatgagaggggcctcctcaggaaagaagacag

SEQ ID NO: 665 - DNA, 452 bp, Homo sapiens
cgggaagcttgtcatcaatggaaatcccatcaccatcttccaggagcgagatccctccaaaatcaagtggggcgatgctggcgctgagtacgtcgtggagtccactggcgtcttcaccaccatggagaaggctggggctcatttgcaggggggagccaaaagggtcatcatctctgccccctctgctgatgcccccatgttcgtcatgggtgtgaaccatgagaagtatgacaacagcctcaagatcatcagcaatgcctcctgcaccaccaactgcttagcacccctggccaaagaatcagtgaatgcagcttttgaaatgacattaacagaaggaagtaagttggagaagaaactcttttattcaacctttgccactgatgaccggaaagaagggatgaccgcgtttgtggaaaagagaaaggccaacttcaaagaccagtgagaaccag

SEQ ID NO: 666 - DNA, 347 bp, Homo sapiens
aaattttggcatgcggctaccaagggcatccttgtggctatggtctgtactttcttcgacgctttcaacgtcccggtgttctggccgattctggtgatgtacttcatcatgctcttctgtatcacgatgaagaggcaaatcaagcacatgattaagtaccggtacatcccgttcacacatgggaagagaaggtacagaggcaaggaggatgccggcaaggccttcgccagctagaagcgggactgaggctgcctcacgtgttgcaagaacagttttgagccattgttaacaatgccttttttcttcacataaagtagttgattacgagggagtcaaattttcttttt

SEQ ID NO: 667 - DNA, 454 bp, Homo sapiens; identical to SEQ ID NO: 87

SEQ ID NO: 668 - DNA, 464 bp, Homo sapiens
ccacctggagacggtgattttgggcctattgaagacacctgctcagtatgacgcttctgagctaaaagcttccatgaaggggctgggaaccgacgaggactctctcattgagatcatctgctccagaaccaaccaggagctgcaggaaattaacagagtctacaaggaaatgtacaagactgatctggagaaggacattatttcggacacatctggtgacttccgcaagctgatggttgccctggcaaagggtagaagagcagaggatgactctgtcattgattatgaactgattgaccaagatgctcgggatctctatgacgctggagtgaagaggaaaggaactgatgttcccaagtggatcagcatcatgaccgagcggagcgtgccccacctccagaaagtatttgataggtacaagagttacagcccttatgacatgttggaaagcatcaggaaagagg

SEQ ID NO: 669 - DNA, 522 bp, Homo sapiens
  misc_feature 422: n = A,T,C or G
ccaggggtctctacaaatttcttagcagattcaatgctatcaaacacaacaaaaattgatcccttaaatgctttatgcaatgttcttctcatctggatatttagtacttgacctttatcttctaaccattcttttatgtcatcaagagttgcatcagttgggaagcctttaatataaacagatctgttttttacatcatttttatactcatcagtcacttcaggtaggggtttgcttggagaccttctgattttagttttatcttcactgatttccatgagttctgccttggatttgctcaatgcttccacaattacattaaagtctgttgttagacggttcaacctgttgaattttatcattatctccaaaggtacccagccttcatccagttttatctgttcctttagaaacttgtcccngtggcaaattgaagtcgccaaaataatactcaatttgatgacagattttggcctccagggcagccatcttttcattatcaccattttcagccattgcggc

SEQ ID NO: 670 - DNA, 524 bp, Homo sapiens
atcgccctgaaggactgtttttgttttgttttgtttgcttggcatagccccttcaaggaatttaatctctcggccatattcttgtctgattttacggaggttgatgtcgctactgtgttaaataaccagtactttggttttcattccgttactaagtactttaaggtcttatatgtcataattttattgctaacatcaaatatttattttattttttagaaaaataactaaacatgggcaaaggagatcctaagaagccgagaggcaaaatgtcatcatatgcattttttgtgcaaacttgtcgggaggagcataagaagaagcacccagatgcttcagtcaacttctcagagttttctaagaagtgctcagagaggtggaagaccatgtctgctaaagagaaaggaaaatttgaagatatggcaaaagcggacaaggcccgttatgaaagagaaatgaaaacctatatccctcccaaaggggagacaaaaaagaagttcaaggatcccaatgcacccaaaagg

SEQ ID NO: 671 - DNA, 189 bp, Homo sapiens
ctgcagatacctcggattgaggatggtaacaattttggagtggctgtccaggagaaggtgtttgagctgatgaccagcctccacaccaagctagaaggcttccacactcaaatctctaagtatttctctgagcgtggtgatgcagtgactaaagcagccaagcagccccatgtgggtgattatcggcag

SEQ ID NO: 672 - DNA, 446 bp, Homo sapiens
ccttccggcggaacatggcagtgaactgctccgagatgcgcttgaagagctcctggatggctgtgctattgccaatgaaggtgactgccatcttgaggccacgaggtgggatgtcacagacggctgtcttgacattgttggggatccattccacaaagtagctgctgttcttgttctgcacgttaagcatctgctcatcgacctccttcatggacatccgaccacggaagacagcagccacggtgaggtatcggccgtggcgggggtcacaggcagccatcatgttcttggcatcgaagacctgctgggtgagttccggcactgtgagagctcgatactgctggcttccacggctggtgagaggggcaaagccaggcataaagaaatggagacgtgggaaggggaccatgttgactgccaacttgcggaggtcagcattgagctgg

SEQ ID NO: 673 - DNA, 442 bp, Homo sapiens
ccacaactgtgaagttagaaaagccctgtcaaagcaagagatggctagtgcttcatccagccaaagaggtcgaagtggttctggaaactttggtggtggtcgtggaggtggtttcggtgggaatgacaacttcggtcgtggaggaaacttcagtggtcgtggtggctttggtggcagccgtggtggtggtggatatggtggcagtggggatggctataatggatttggtaatgatggaagcaattttggaggtggtggaagctacaatgattttgggaattacaacaatcagtcttcaaattttggacccatgaagggaggaaattttggaggcagaagctctggcccctatggcggtggaggccaatactttgcaaaaccacgaaaccaaggtggctatggcggttccagcagcagcagtagctatggcagtggcagaaga

SEQ ID NO: 674 - DNA, 527 bp, Homo sapiens
aaaatgatggttgtttttccgagcttcattaacaaaaaactctgctaaataaaatgcggttttcacagcattaggtgcatgggaaatgccatccaaattcttccactcataaggtgctttctctggatgccactggacaccatatactggatacttatatccttccattgttgaaataaactcaatcttgccatctgtatttgtagttaagacattgaaaaacttctttaacttttcattcattgtaaaattcttcacggagaggctccacttatggaaattggcagtcagaggttctactgctaatgacagcaacaactcagtaggaaaattctggaacattctgctgtgcaattgacctccagtgaagttcagcggcattgccacgtcaacagtatctgtggcaattaataagcactctccactaatcagcagtgaaagctcttcaaatccaaggcatgtgccccacacaggaaaatagtctccatcatcaaaactctgtatggacaagttataaaatattttgg

SEQ ID NO: 675 - DNA, 423 bp, Homo sapiens
cctacagacttatttcttcttggacacacccacggtgcggccacggcggccagtggtcttggtgtgctggcctcggacacgaaggccccagaagtgacgcagccctctatgggcccgaatcttcttcagtcgctccaggtcttcacggagcttgttgtccagaccattggctaggacctggctgtattttccatcctttacatccttctgtctgttcaagaaccagtctgggatcttgtactggcgtggattctgcataatggtgatcacacgttccacctcatcctcagtgagttctcccgccctcttggtgaggtcaatgtctgctttcctcaacaccacatgagcatatcttcggcccacacccttaatggcagtgatggcaaaggctattttccgccgcccatcgatgttggtgttgag

SEQ ID NO: 676 - DNA, 452 bp, Homo sapiens
  misc_feature 435, 452: n = A,T,C or G
ctgcacatcaaatgtacctgggatgaggtgggtggagctttgaatctaccactatccaggccacacacctagaagctctggtttcattgtttcattgatttcattgttttgattgatgctgaccttaggcagcagagttttcaatgctctccaggtgtttctaaagtgcagacaagtttaggaccgtgcttgagggtgaagggcaggactgtgatggggaggggcaaatatggggcccttggggtgcaggcaatggttttccttgacctgaatgggggtctcacaggtgttgcatatacatatacgtacacatgtcagctcttccctttctccacagcatacacgtaggtgttccacggcccacaggtgacagcctttacttggagttgcttatctacaaagtattccacacggcgaggccgatccaagctggtngtgtcctcgtggcccan

SEQ ID NO: 677 - DNA, 365 bp, Homo sapiens
aaaaaatagttcagtacatttttgttataaaattcatttacaggaggttattcacatgtacttgtcaaatttactcctgataattcacaaaaacatacaactcaacaaactgtgcacaataaatccaaggcaaattatatacaaagaaacaaaacaagcttttaagtagcacatattcatttgaaataactaatattgaaagaagacagggaactttcttttaatgccatggcaaagacgaagcgaagagccacacttcacaccttgtaaaaagaatagccctgttcaacaacgctgcgctgacagccacatcaggaggggccacggtgaacataggaaatggctttggcaaatacttgtaccaa

SEQ ID NO: 678 - DNA, 478 bp, Homo sapiens
ctgtccaatggcaacaggaccctcactctattcaatgtcacaagaaatgacacagcaagctacaaatgtgaaacccagaacccagtgagtgccaggcgcagtgattcagtcatcctgaatgtcctctatggcccggatgcccccaccatttcccctctaaacacatcttacagatcaggggaaaatctgaacctctcctgccacgcagcctctaacccacctgcacagtactcttggtttgtcaatgggactttccagcaatccacccaagagctctttatccccaacatcactgtgaataatagtggatcctacacgtgccaagcccataactcagacactggcctcaataggaccacagtcacgacgatcacagtctatgcagagccacccaaacccttcatcaccagcaacaactccaaccccgtggaggatgaggatgctgtagccttaacctgtgaacctgagattcagaaca

SEQ ID NO: 679 - DNA, 437 bp, Homo sapiens
gcccgtgccgccgccgcctcctgggaagagaggaagcgggagaggagcccacgtcgcctgtcacccaatatctccagccgcgcagtcccgaagagtgtaagatgttcgcctgcgccaagctcgcctgcaccccctctctgatccgagctggatccagagttgcatacagaccaatttctgcatcagtgttatctcgaccagaggctagtaggactggagagggctctacggtatttaatggggcccagaatggtgtgtctcagctaatccaaagggagtttcagaccagtgcaatcagcagagacattgatactgctgccaaatttattggtgcaggtgctgcaacagtaggagtggctggttctggtgctggtattggaacagtctttggcagccttatcattggttatgccagaaacccttcgctgaagcagcag

SEQ ID NO: 680 - DNA, 292 bp, Homo sapiens
ccagcagccaggagggaggtaggctgatgtgatgggatgggatcttgccctgggttggtctcatggtgcagaagagcagtgttggaatcattctaatgcttcaggatgcctcatgtgccccatggagctcagacatcaggaggtgctgggactctatttagccgttcgatgatgcggttgttgtccaggaggtcagatgccagcagcttcatcccctcgcagagctcttgcatgtggagaagcaggtcctttcgtgtagggctggggtaaggagctatgggaggcggcgagg

SEQ ID NO: 681 - DNA, 277 bp, Homo sapiens
ccttgaccgcgtacttccgcagcgggtacagccgctccttccgctgctgcttcttggtcttcaggttctcctcgtgcttgttgagccggcggcgcatggcacgtgtcttcttaggccgcaggtccaggggcttgtacttcttgcccttgtagaatttcctgaggttttctttctgagtctggttaataactgtgagaacacgggcaatggatttccggacgactcggatcttagagagcttggaggccgcaccgcctgtcactttggcgacgcgcag

SEQ ID NO: 682 - DNA, 362 bp, Homo sapiens
ccactcctgctgtatctacacctaccagtcactgaacacctgcccaagtgtgatggcttccatgcaggagacccaagtggctctgctagggagaatgacttatttacctaaggcttttttatttctcaaaagtggggggaaaaagggctggtttctagaaacagatgtggaattgaagaatgtcccagggagctaagttttaaggactaatcacaaacttgtttctccaacaacatcctgaatccattccttgcaccatcacacatttttcatgcatcagaagtgtttctagagctccagaaccacgagtacctcatcacgtcctgagcgctcacatcccccagcaagccgcctgcaccagg

SEQ ID NO: 683 - DNA, 435 bp, Homo sapiens
atcagttgccaagagcaacatacataccgacctggctgaattattgccagtgaaaacaacctgtacgaagcctttgctcaggttctaaaatatgtttgtccttgcacgaattttgtatatttcaaatatttctgtaaaggtttcttcttttctgttagagtgtggtgttaagccagagtcagtggtttgtgttctcattaaaatgtttgtttaaatcctatgtccaattcaagcctatctaactacatttggtaggattaacatttcatataacaaatggggcttaattaaaaactttaacttggaataaaggaacagggatcactttatcttctgccttcatttaccttagtccaagattcttgcaaaacaggcaactgaacaaacattaggtttatgtaggtaaaatgtgaaagcatttctcctccacttttt

SEQ ID NO: 684 - DNA, 387 bp, Homo sapiens
attggattgccacacggctcacattgcatgcaagtttgctgagctgaaggaaaagattgatcgccgttctggaaaaaagctggaagatggccctaaattcttgaagtctggtgatgctgccattgttgatatggttcctggcaagcccatgtgtgttgagagcttctcagactatccacctttgggtcgctttgctgttcgtgatatgagacagacagttgcggtgggtgtcatcaaagcagtggacaagaaggctgctggagctggcaaggtcaccaagtctgcccagaaagctcagaaggctaaatgaatattatccctaatacctgccaccccactcttaatcagtggtggaagaacggtctcagaactgtttgtttcaattgg

SEQ ID NO: 685 - DNA, 308 bp, Homo sapiens
cctcagttagtgagtcaagctgtgatgtgtgtgtctgaacacaactggctcccttggtataccgggggctccctctccagatgggtgtgagtgcatggtcctactgtacacacaggtctcagtatctatatgtgtctcatttgttcccatgggtctctgtgtttggatacataagcatggatatccctgctcatacagcaggaactcaggatctgcatggtgtatgtccctgtctgtaaacatgggctccagcaagtggatatgtgcgggcctgcccgctcctgtccatccgcaggtcttccttcagg

SEQ ID NO: 686 - DNA, 500 bp, Homo sapiens
gtatttatttgtcttttctctgtcaaaccctgagccaaccacgttccccaggctgcctggggaggtataggaaaaggaacacacggggccaaccagacgcgggagaactatgggaggtggagacggctccttcacatggcaaagaggatgagaaaggctaccatcagacaaaagagccccatggcctccgagagggcaaagcccagaatggcgtaggagaagagctgttgcttcagagaagggttcctggcatagccaatgatgaggctcccaaacacagttccaatcccagccccagaaccagccaccccaactgtggcagccccagctccaatgaacttggctgctgtgtcgatgtcccttgaaatggcgctggtttggaagctgcggctagagacaagtgaggtaaggggacatgagactgccaagctgctgaggctctcatctgtcagtatctccggtcgtttcagcaccactgcagatagcggacggctcagcag

SEQ ID NO: 687 - DNA, 558 bp, Homo sapiens
  misc_feature 555: n = A,T,C or G
ctctactaaaaatacaaaaatgagctgggcttggtggcgcgcacctgtagtcccagttactcgggaggctgaggcaggagaatcgcttgaacccgggaggtggagattgcagtgagcccagatcgcaccactgcactccagtctggcaacagagcaagactccatctcaaaaagaaaagaaaagaagactctgacctgtactcttgaatacaagtttctgataccactgcactgtctgagaatttccaaaactttaatgaactaactgacagcttcatgaaactgtccaccaagatcaagcagagaaaataattaatttcatgggactaaatgaactaatgaggataatattttcataattttttatttgaaattttgctgattctttaaatgtcttgtttcccagatttcaggaaactttttttcttttaagctatccacagcttacagcaatttgataaaatatacttttgtgaacaaaaattgagacatttacattttctccctatgtggtcgctccagacttgggaaactattcatgaatatttatattgnatg

SEQ ID NO: 688 - DNA, 493 bp, Homo sapiens
aaaaaaaggcccccagggcaagttatttacagtttaattgccactgtcaactgatctggaccttgatcgggaccgggacctctggcgatccacagatgctggagacttagatctacttgaagaaccacgtttctggctcttctcaggcacgggagacctactaacagaacgggacttgctccggctccggctcctgctcctgcttcttgaccggctgtaagatttgcgactacgggaacgggatcggctacgagacctagaggaacttctggtccgggatcgagacctgcttcttgacctactgtgccttttgctgccttcaattaattttatttttctcccatttatttcctttccagaaagtttttcaatagcattctttaagtcaccataagaggcaaactcaaccaccccttcatttaatttaggtcggtgtgcatccgcaaacgttacttccccagcttgtctcatgaaatctttgagatcctgccag

SEQ ID NO: 689 - DNA, 439 bp, Homo sapiens
aaacgcaaagattaccttaagcaacacatgaaaactcatgccccagaaagggatgtatgtcgctgtccaagagaaggctgtggaagaacctatacaactgtgtttaatctccaaagccatatcctctccttccatgaggaaagccacccttttgtgtgtgaacatgctggctgtggcaaaacatttgcaatgaaacaaagtctcactaggcatgctgttgtacatgatcctgacaagaagaaaatgaagctcaaagtcaaaaaatctcgtgaaaaacggagtttggcctctcatctcagtggatatatccctcccaaaaggaaacaagggcaaggcttatctttgtgtcaaaacggagagtcacccaactgtgtggaagacaagatgctctcgacagttgcagtacttacccttggctaagaactgcactgctttgttt

SEQ ID NO: 690 - DNA, 465 bp, Homo sapiens
aaactggattgaattgctttgtcttagatgaggctgagaaggttgtttctgaacagaaagtaatgatgacgtccctcttttttgtagtatgtccgtggttcagaccctgtattaaagcttttggacgacaatgggaacattgctgaagaactgagcattctcaaatggaacacagacagtgtagaagaattcctgagtgaaaagttggaacgcatataaatcttgcttaaattttgtcctatccttttgttaccttatcaaatgaaatattacagcacctagaaaataatttagttttgcttgcttccattgatcagtcttttacttgaggcattaaatatctaattaaatcgtgaaatggcagtatagtccatgatatctaaggagttgacaagcttaacaaaacccattttttataaatgtccatcctcctgcatttgttgataccactaacaaaatgctttg

SEQ ID NO: 691 - DNA, 550 bp, Homo sapiens
ccacggggactgttattcgcaagctggttttctagacctgttagttggaagcatggtgagcaccatttctggacgctcaggccgtgtcgggcttcagtcatctccaccacacaggtacagcagcgctttctggtagtcgcccttagtgtcttgctggatataatagtacagggacttgccgtactttctcttgaattcagacctaattttcaacatgtccacttcactgcgggagaccatgattctgatcaggaccttatctcgcgtccccttgcccttcatggagtcatacagccgatcagcaaaatacaggggcttgttctgaatgcactgaaccaggttcaggaaagcattttccaggtctcctttaacctctttcctgatgctttccaacatgtcataagggctgtaactcttgtacctatcaaatactttctggaggtggggcacgctccgctcggtcatgatgctgatccacttgggaacatcagttcctttcctcttcactccagtgtcatagagatcccgagcatcttggtcaatcagttca

SEQ ID NO: 692 - DNA, 370 bp, Homo sapiens
  misc_feature 3, 14, 51, 108, 330, 339: n = A,T,C or G
canatgtcctaggncctcccaattcttagacatttaatacccatttttctnctccttttattcggaccttgtatcttccatttagcttctcaaatcatccaaaaccgnatccaggccatcaccaatcattctatacgacaaatgtttcttctaacatccccatgatatcaccccttaccacaagacctcccttcagcttaatctctcccactctaggctcccacgccgcccctaatcccgcttgaagcagccctgagaaacatcgcccattatctctccataccaccccccaaaaattttcgctgccccaacacttcaacactattttgntttatttgncttattaatataagaaggcaggaatgtcagg

SEQ ID NO: 693 - DNA, 520 bp, Homo sapiens
aaaacctgaattgttaccgcatcattttccttttcataaaaatagatatatctgttcagaatttctataaaaagctgcacttgtagagaggggtccatgcactgatttgctatttttagagctttttttaggcactccattaccctcttgcctccgtgaagctcctccccatttttgtccgtgtttctgccagaccagaagagatgtgcacaggtgctcacagctcggccctgatcaggtttctttagaagtttggatgcagcaagggcacactgagtcctcagaggttcatgattctcttcactgaagcacttcatcctttcaaaagtgccaatgatcaaggtgatggcagctagctgtgctttggaatcgctgatttcatcttcatacagagaaaatgcctgggacatgaattcatatgcgactgtctcatgattttcaaaaccaatttccccagcagctagtgctccttgaagaaaaagtcttaagggcaattctgccagctctgctttgatcaaag

SEQ ID NO: 694 - DNA, 342 bp, Homo sapiens
ctgcattgagttagcgggggcggagtggtcctggggcagcctgtccctaacagaatccacctccgagttgtgacaattaaatgaaaaggttgaaaaggtgaacatgaagcacctgctacactgccctgttgccaccagcattgtcactgctctagctcctgtggcactgcacggacacgtggttgctacaagttagtacgcatatttggccttattagaggcactttcctattgtaactgaagggatagttggcttaagtcaattgaaataccagcaacaggacattccagcttcaatggcttgtgcctgtagttgtcaacctgcgccaagaactgaggcag

SEQ ID NO: 695 - DNA, 503 bp, Homo sapiens
aaattgttaggaggcttggagctattagttaatctatcttccaatacactgtttaatatagcactgaataaatgatgcaagttgtcaatggatgagtgatcaactaatagctctgctagtaattgatttatttttcttcaataaagttgcataaaccaatgagttagctgcctggattaatcagtatgggaaacaatcttttgtaaatgcaaagctgttttttgtatatactgttgggatttgcttcattgtttgacatcaaatgatgatgtaaagttcgaaagagtgaatattttgccatgttcagttaaagtgcacagtctgttacaggttgacacattgcttgacctgatttatgcagaattaataagctatttggatagtgtagctttaatgtgctgcacatgatactggcagccctagagttcatagatggacttttgggacccagcagttttgaaatgtgtttatggagtttaagaaatttattttccaggtgcagc

SEQ ID NO: 696 - DNA, 325 bp, Homo sapiens
ccagataaggctgacttcagtgctgatgcaagttcctttttggtccttctctggtaggcgaaggcaatatcctgtctctgtgcattgctgcggttggtcaaaatgttgacaatggtgacctcatccacacctttggtcttgatggctgtttcaatgttcaaagcatcccgctcagcatcaaagttagtataggctttgacagacccatatgcacttgggggtgtagagtgatcaccctccaagctgagcttgcacaggatttcgtgaacagtagacattttgaaggaagctgggccgtgcgccgagagctgagagcgtccccaaa

SEQ ID NO: 697 - DNA, 500 bp, Homo sapiens
  misc_feature 422: n = A,T,C or G
ccaccatctatgcaaagtgaaagctctgaacaagggtgatgccaactctgaagtcactgtgtactaccagtcaggtaccaggagtctaagagaatatacgcttatggagctgcttgtgatgcacatggaagaaccttgttttgacttccttcgaaccaagcagacccttgggtaccatgtctaccctacctgtaggaacacatccgggattctaggattttctgtcactgtggggactcaggcaaccaaatacaattctgaagttgttgataagaagatagaagagtttctttctagctttgaggagaagattgagaacctcactgaagaggcattcaacacccaggtcacagctctcatcaagctgaaggagtatgaggatacccaccttggggaggaggtggataggaactggaatgaangtggttacacagcagtacctctttgaccgccttgcccacgagattgaagcactgaagtcattctcaaaatcagacctg

SEQ ID NO: 698 - DNA, 117 bp, Homo sapiens
ccagataccgcccacgtgcccccatcattgctgtgacccggaatccccagacagctcgtcaggcccacctgtaccgtggcatcttccctgtgctgtgcaaggacccagtccaggagg

SEQ ID NO: 699 - DNA, 268 bp, Homo sapiens
ctggggttataagtttatagttgggaacttccttacagagtttatcataggtagctttgtcaaacaagactaagttattgagcttgtcccgaactttgcctttggaccacttcttctttttggccttgcccccggatttgttcactgggtctttgtctttcttggccgactttccagcgtccttcttcttcttgtcgtccttaggcggcattgcgaagctcggagaatagcagcagacaccgcagcctcgtcaagatgtcggacaaaa

SEQ ID NO: 700 - DNA, 205 bp, Homo sapiens
tttttgcactttttttataagcaaaaacgtgccgtttaaaccactggatctatctaaatgccgatttgagttcgcgacactatgtactgcgtttttcattcttgtatttgactatttaatcctttctacttgtcgctaaatataattgttttagtcttatggcatgatgatagcatatgtgttcaggtttatagctgttgtgttt

SEQ ID NO: 701 - DNA, 268 bp, Homo sapiens
ctggtagctggtgttgcattcaagaagactttctcttacgctgggtttgaaatgcaacccaaaaagtaccacaatcccaagattgcccttttgaatgtcgagctcgagttgaaagctgagaaagacaatgctgagataagagtccacacagttgaggattatcaggcaattgttgatgctgagtggaacattctctatgacaagttagagaagatccatcattctggagccaaagttgtcttgtccaaactccccattggggatgtgg

SEQ ID NO: 702 - DNA, 544 bp, Homo sapiens
  misc_feature 523: n = A,T,C or G
cacggatctttccaagaaggcaggcgagatctggaagggaatgtccaaagagaagaaagaggagtgggatcgcaaggctgaggatgccaggagggactatgaaaaagccatgaaagaatatgaagggggccgaggcgagtcttctaagagggacaagtcaaagaagaagaagaaagtaaaggtaaagatggaaaagaaatccacgccctctaggggctcatcatccaagtcgtcctcaaggcagctaagcgagagcttcaagagcaaagagtttgtgtctagtgatgagagctcttcgggagagaacaagagcaaaaagaagaggaggaggagcgaggactctgaagaagaagaactagccagtactccccccagctcagaggactcagcgtcaggatccgatgagtagaaacggaggaaggttctctttgcgcttgccttctcacaccccccgactccccacccatattttggtaccagtttctcctcatgaaatgcagtccctggattctgtgccatctgnacatgctctcctgttggtgtg

SEQ ID NO: 703 - DNA, 401 bp, Homo sapiens
ttttttttttttagttgctgttcataagtttattatctatatctgaaaaaatcatagaaaattgctgggtttagctctcagcagcccgctcctgagctctgaggaagcttgccttcttttgagctacccgatccttcttctgagcaagggacattttgggacggttccacctcttctttttaacttctttcttgggcttcttttcatagactggattctctcgtatagcagcatgagctttcttatacatctcctccatcatgtctggagttacgctgttctttatgtattgagagaactgtttcttgtaagcatcttcatcttcttccattaagtagcgcatgtaatctgcaacattctggcccatgatgtgcttccgatgtacttctgcattaaattcc

SEQ ID NO: 704 - DNA, 221 bp, Homo sapiens
aaaagacaaaaacaaaacaaaaataccacagctcaagataaagagtcctatacagaaatcacaaaaaggacagaccatctaaggaaaaattaaaaagacgacacaaggacaggctgggcagcctgggtcagggctcctggctggtgacctgctttgagtaggtttcttgcaggtacttcttaaaagctgtggggtttttccagagctcggcagcatgtgtg

SEQ ID NO: 705 - DNA, 568 bp, Homo sapiens
ccaggctggtcttgaactcctgacgtcaagtgatctgcctgccttggtctcccaatacaggcatgaaccactgcacccacctacttagatatttcatgtgctatagacattagagagatttttcatttttccatgacatttttcctctctgcaaatggcttagctacttgtgtttttcccttttggggcaagacagactcattaaatattctgtacattttttctttatcaaggagatatatcagtgttgtctcatagaactgcctggattccatttatgttttttctgattccatcctgtgtccccttcatccttgactcctttggtatttcactgaatttcaaacatttgtcagagaagaaaaaagtgaggactcaggaaaaataaataaataaaagaacagccttttcccttagtattaacagaaatgtttctgtgtcattaaccatctttaatcaatgtgacatgttgctctttggctgaaattcttcaacttggaaatgacacagacccacagaaggtgttcaaacacaacctactctgcaaaccttggtaaaggaaccagtc

SEQ ID NO: 706 - DNA, 313 bp, Homo sapiens
  misc_feature 153: n = A,T,C or G
cctcctggtcactctgtccctgcactccatgtatagtcctcttgggttgggggtgggggggtgccgttggtgggagagacaaaaagagggagagtgtgctttttgtacagtaataaaaaataagtattgggaagcaggcttttttcccttcanggcctctgctttcctcccgtccagatccttgcagggagcttggaaccttagtgcacctacttcagttcagaacacttagcaccccactgactccactgacaattgactaaaagatgcaggtgctcgtatctcgacattcattcccacccccctcttattt

SEQ ID NO: 707 - DNA, 410 bp, Homo sapiens
ccagcgagcacatgaagcggttcttcgtgaactttgtggttgggcaggatccgggctcagacgtcgccttccacttcaatccgcggtttgacggctgggacaaggtggtcttcaacacgttgcagggcgggaagtggggcagcgaggagaggaagaggagcatgcccttcaaaaagggtgccgcctttgagctggtcttcatagtcctggctgagcactacaaggtggtggtaaatggaaatcccttctatgagtatgggcaccggcttcccctacagatggtcacccacctgcaagtggatggggatctgcaacttcaatcaatcaacttcatcggaggccagcccctccggccccagggacccccgatgatgccaccttaccctggtcccggacattgccatcaacag

SEQ ID NO: 708 - DNA, 474 bp, Homo sapiens
ctgctgcccgtgctggtgccattgccccatgtgaagtcactgtgccagcccagaacactggtctcgggcccgagaagacctcctttttccaggctttaggtatcaccactaaaatctccaggggcaccattgaaatcctgagtgatgtgcagctgatcaagactggagacaaagtgggagccagcgaagccacgctgctgaacatgctcaacatctcccccttctcctttgggctggtcatccagcaggtgttcgacaatggcagcatctacaaccctgaagtgcttgatatcacagaggaaactctgcattctcgcttcctggagggtgtccgcaatgttgccagtgtctgtctgcagattggctacccaactgttgcatcagtaccccattctatcatcaacgggtacaaacgagtcctggccttgtctgtggagacggattacaccttcccacttgctgaaaaggtcaagg

SEQ ID NO: 709 - DNA, 442 bp, Homo sapiens
ccaacctcaggcaacgggtggagcagtttgccagggccttccccatgcctggttttgatgagcattgaaggcacctgggaaatgaggcccacagactcaaagttactctccttccccctacctgggccagtgaaatagaaagcctttctattttttggtgcgggagggaagacctctcacttagggcaagagccaggtatagtctcccttcccagaatttgtaactgagaagatcttttctttttcctttttttggtaacaagacttagaaggagggcccaggcactttctgtttgaacccctgtcatgatcacagtgtcagagacgcgtcctctttcttggggaagttgaggagtgcccttcagagccagtagcaggcaggggtgggtaggcaccctccttcctgtttttatctaataaaatgctaacctgcaaaaaaaaa

SEQ ID NO: 710 - DNA, 535 bp, Homo sapiens
  misc_feature 486: n = A,T,C or G
cgctcccccctccccccgagcgccgctccggctgcaccgcgctcgctccgagtttcaggctcgtgctaagctagcgccgtcgtcgtctcccttcagtcgccatcatgattatctaccgggacctcatcagccacgatgagatgttctccgacatctacaagatccgggagatcgcggacgggttgtgcctggaggtggaggggaagatggtcagtaggacagaaggtaacattgatgactcgctcattggtggaaatgcctccgctgaaggccccgagggcgaaggtaccgaaagcacagtaatcactggtgtcgatattgtcatgaaccatcacctgcaggaaacaagtttcacaaaagaagcctacaagaagtacatcaaagattacatgaaatcaatcaaagggaaacttgaagaacagagaccagaaagagtaaaaccttttatgacaggggctgcagaacaaatcaagcacatccttgctnatttcaaaaactaccagttctttattggtgaaacatgaatccagatggc

SEQ ID NO: 711 - DNA, 332 bp, Homo sapiens
cctggatgtggctcttcgcactgaaggccaagtagtagatcacaaggccgatcgccgcagccagcacctcagtggacacccagggcccgttccaagtgccccgatggtccacgctgactgtaaacagaggcgggatgatggaaatgtcctcgttattcctctgagccttcctgaggaggctgtaggactcctcgtcgaagaatctaacctcgtaggtgcctgcgtgggcgctcttgtggtccaggctccaggacacctgataacgccccgcatcctggcctcgagtgacagggaattgttttccaccgacgtcagcatagagagccatgttc

SEQ ID NO: 712 - DNA, 481 bp, Homo sapiens
ctgaagaaaaaagcagtcatcgattttaagtccaatgggcacatttatgacaatcggatagttctgaatggcatcgacctcaaagcatttcttgatagtctaccagatgtgaaaattgtcaagatgaagtgtcctgatggaggagacaatgcagatagcagtaacacagctcttaatatgcctgttattcctatgaatactattgcagaagcagttattgaaatgattaaccgaggacagattcaaataacaattaatggattcagtattagcaatggactggcaactactcagatcaacaataaggctgcaactggagaggaggttccccgtaccattattgtaaccacccgttctcagtacgggttaccagaagatgccatcgtatactgtaactttaatcagttgtataaaattgacccttctactttgcagatgtgggcaaacattctgaagcgtgttcccaatagtgtactctggc

SEQ ID NO: 713 - DNA, 129 bp, Homo sapiens
caacagcgagcaccttcctgctccgtgactgttcttggcccctctagcagtcctcagatctttagatcggccctcgcagggtcagcagaacaggcagccgtgaaggtgaggggcatggaggaatctgtt

SEQ ID NO: 714 - DNA, 471 bp, Homo sapiens
ctgacattcctgccttcttatattaataagacaaataaaacaaaatagtgttgaagtgttggggcagcgaaaatttttggggggtggtatggagagataatgggcgatgtttctcagggctgcttcaagcgggattaggggcggcgtgggagcctagagtgggagagattaagctgaagggaggtcttgtggtaaggggtgatatcatggggatgttagaagaaacatttgtcgtatagaatgattggtgatggcctggatacggttttggatgatttgagaagctaaatggaagatgcaaggtccgaataaaaggaggagaaaaatgggtattaaatgtctaagaattgggaggacctaggacatttgattagagagtgcctaaggagattcagcatagtcctgccagcaaagattatttacttcaagagttaagagtggcagtttggggatagcaccaggagatatcag

SEQ ID NO: 715 - DNA, 454 bp, Homo sapiens
ctggcttcactgctcaggtgattatcctgaaccatccaggccaaataagcgccggctatgcccctgtattggattgccacacggctcacattgcatgcaagtttgctgagctgaaggaaaagattgatcgccgttctggtaaaaagctggaagatggccctaaattcttgaagtctggtgatgctgccattgttgatatggttcctggcaagcccatgtgtgttgagagcttctcagactatccacctttgggtcgctttgctgttcgtgatatgagacagacagttgcggtgggcgtcatcaaagcagtggacaagaaggctgctggagctggcaaggtcaccaagtctgcccagaaagctcagaaggctaaatgaatattatccctaatacctgccaccccactcttaatcagtggtggaagaacggtctcagaactgtttgtttcaattgg

SEQ ID NO: 716 - DNA, 300 bp, Homo sapiens
caggtcctgggctcgcctggaccacaagtttgacctgatgtatgccaagcgtgcctttgttcactggtacgtgggtgaggggatggaggaaggcgagttttcagaggcccgtgaggacatggctgcccttgagaaggattatgaggaggttggagcagatagtgctgacggagaggatgagggtgaagagtattaacctgtgtgctgtacttttacactcctttgtcttggaactgtcttatttttgttctgtaaatgtctattgccgtaaattgttaataaaattgatgtttccatttt

SEQ ID NO: 717 - DNA, 575 bp, Homo sapiens
aaaatcatatccagcacaaaaactatttctggctgaatagcacagaaaagtattttaacctacctgtagagatcctcgtcatggaaaggtgccaaactgttttgaatggaaggacaagtaagagtgaggccacagttcccaccacacgagggcttttgtattgttctactttttcagccctttactttctggctgaagcatccccttggagtgccatgtataagttgggctattagagttcatggaacatagaacaaccatgaatgagtggtatgatccgtgcttaatgatcaagtgttacttatctaataatcctctagaaagaaccctgttagatcttggtttgtgataaaaatataaagacagaagacatgaggaaaaacaaaaggtttgaggaaatcaggcatatgactttatacttaacatcagatcttttctataatatcctactactttggttttcctagctccataccacacacctaaacctgtattatgaattacatattacaaagtcataaatgtgccatatggatatacagtacattctagttgggaatcgtttactctgctag

SEQ ID NO: 718 - DNA, 483 bp, Homo sapiens
ctgcctataaaactagacttctgacgctgggctccagcttcattctcacaggtcatcatcctcatccgggagagcagttgtctgagcaacctctaagtcgtgctcatactgtgctgccaaagctgggtccatgacaacttctggtggggcgagagcaggcatggcaacaaattccaagttagggtctccaatgagcttcctagcaagccagaggaagggcttttcaaagttgtagttacttttggcagaaatgtcgtagtactgaagattcttctttcggtggaagacaatggatttcgccttcactttcctgtccttaatatccactttgttgccacacaacacaatggggatgttttcacacactcgtaccagatctctatgccagttaggcacattcttgtaagtaactctcgatgttacatcaaacattatgatggcacactgggcttggatataatagccatctctcagtccaccgaa

SEQ ID NO: 719 - DNA, 338 bp, Homo sapiens
aaaaaaactggcttggaaaaaaatcacaaaaaatttaagtgacaacaaatcttgattaactagtccatcttcctaccacacatgattatactctaatgtagatattctggttgaatttcttccaaccaagtttgaagggccccagtagaaaatcaagtgttaatactttcagatttttattgtccaaaactgttgacaaagaaaagctaacttcaacataacttgtttctggctatacaaagacctatttcaggtgctacagatactgaaaataggagtattttacttatttctcaagagacagacttatgccatctaagaaaatgaattcagttttt

SEQ ID NO: 720 - DNA, 485 bp, Homo sapiens
  misc_feature 474: n = A,T,C or G
aaaatgcactgggagggaaaaaacgaaattaacaatctactattccctaatatatatggcttggcacccagagaaagcctctacccccgaaagagactttctacatagggttaagcttcattaaatgaggtgcaacctttcattttcagggcatctcttttcttgcaaggtctttagaggcagaagttccacttggattctaatacacatctctgtgagctcagtttcctgaaaatatacacctactgggttctaggttctcccttaccagtgactgtattcattatttcacagccaccagaatcggacatacactattaacatgatgaaaaatacagctactgctgcaagtttggcataagtggaacgcatgttcaagtacttcgcatcctggcggtatttcttggacagactggacaaattgttagcctttgaatccaatgctgagagtgcttctcctcgttgtaacacttnttcaatattgg

SEQ ID NO: 721 - DNA, 442 bp, Homo sapiens
aaaacaagcaaattttattaaaggaaaattttgcaggtttaaggtttgcaggtgaaattttgtaggtgaaaaggtttacttttcaccagtctgttctggcatgcttctaatgatgtcagagtcacctggatcaatgatagccagtgtgcacactctgtagtattttccgcatgctgtgcccagttcaatattattgccactgtagtgatggacaccagttttagccaacatagcatagtactctatttcagatttcctcaaagctgggcagttgttagcgagaatgaccaatttcgctttgccttgtctgatcatcttcagagtctgcttgtaccccaggacgtacttcccacttttcataacgagttggagcctagagttgatcgactccagcgactttttcgtcttctttgcggccaccatcttcctgccttaggagcgg

SEQ ID NO: 722 - DNA, 256 bp, Homo sapiens
ggccgatacctcaccgtggctgctgtcttccgtggtcggatgtccatgaaggaggtcgatgagcagatgcttaacgtgcagaacaagaacagcagctactttgtggaatggatccccaacaatgtcaagacagccgtctgtgacatcccacctcgtggcctcaagatggcagtcaccttcattggcaatagcacagccatccaggagctcttcaagcgcatctcggagcagttcactgccatgttccgccggaagg

SEQ ID NO: 723 - DNA, 224 bp, Homo sapiens
ctgaagccgtggatacagaaatctctgcaggcaagttgctccagagcatattgcaggacaagcctgtaacgaatagttaaattcacggcatctggattcctaatccttttccgaaatggcaggtgtgagtgcctgtataaaatattctatgtttaccttcaacttcttgttctggctatgtggtatcttgatcctagcattagcaatatgggtacgagtaagca

SEQ ID NO: 724 - DNA, 260 bp, Homo sapiens
aaaaattatcatcaagacattttacaccacaagtcacataaaattaggtctacttcagccagataacctatagctgttaaagaattatattatcctgttcataagatgagaggtagtgacattttattctctcaatgctgagctaaaaattccacacatctggcacatgggttacaagggggaaaagcacagaagcaccattgcccactcctcaggttttggtatttcaagtcacccataacttcatttgctattggcag

SEQ ID NO: 725 - DNA, 196 bp, Homo sapiens
aaaaaacaaacaggttgaaaaatgggttaaagtaggcaaatacaacatatctgcctttagagctatcaactcaggaattctctcaattatgaaatcttgcagagaagttatttttctttctcaaaatccaggtgatgacaatattccttactccagatctggcattttttcatcatcactgtcttgtgaatcatca

SEQ ID NO: 726 - DNA, 479 bp, Homo sapiens
gacggcttgagggctgtcaaaaatgctattgatgatggctgtgtggttccaggtgctggtgccgtggaagtggcaatggcagaagccctgattaaacataagcccagtgtaaagggcagggcacagcttggagtccaagcatttgctgatgcattgctcattattcccaaggttcttgctcagaactctggttttgaccttcaggaaacattagttaaaattcaagcagaacattcagaatcaggtcagcttgtgggtgtggacctgaacacaggtgagccaatggtggcagcagaagtaggcgtatgggataactattgtgtaaagaaacagcttcttcactcctgcactgtgattgccaccaacattctcttggttgatgagatcatgcgagctggaatgtcttctctgaaaggttgaattgaagcttcctctgtatctgaatcttgaagactgcaaagtgatcctgaggattacag

SEQ ID NO: 727 - DNA, 379 bp, Homo sapiens
aaaattaatcttgcttcattgttacatgtaatatatttcagacattttcactggaagatttatgaacagaaatattggttgaaagttagagattttacaaaatgctgacaaaaatattttcctagcatcagtagatttctggcatatgtttctgctagctatatatttaggaaattcaaagcataaaactttggcaacatcttggctgttctagacacagtgtacttgtcaacccctctcaggtaccttttcttgggatgcttattagaagccaagtaaagtgcttaaggtttgttttcattaaattagctatttctgctcccctgttcaaagatgcattttgagtgtttatagatcactgccctttttgaaatcacct

SEQ ID NO: 728 - DNA, 425 bp, Homo sapiens
aaatttctgaacttcttcaatacaaattaaaatagtactggagtcttttgggaggccaatagctagcagctacattaattggtgtagaggagcctccttatcgataaccaggtccaggttgggtatagccctgaccaaagggaggacggttacgcgcataaggattaggcccacttggaggaggggtcatggtacttccaggaagtgaagtaaaacctggtcttggttgataggccccaggttggcttggagccattccaggttgagaggcaggagccacagtataattagtaggctgagaagtttgggcagtgtaagtttgtgcaggataattgctcgcctggtactgctgtggcggctgagcaggcagttgttgaggctgaccagaaaaggcaggagctggtgcctgggaagttggttgctgg

SEQ ID NO: 729 - DNA, 442 bp, Homo sapiens
  misc_feature 431: n = A,T,C or G
caactggatggaagactcggacgtggaagatctgactaaagagaccctgcacaagcagtaccacctggtaaaatcgcacaccaacaccagccacgtcatgcagtatggaaacaaaacaatctccaccatgaaagtgatgcagtttcagggtatgaagcgcaaagccagttctcccgtccccctacctccagtcacacaccttgacctcacccccagccctgatgtgcctctcaccatcatgaaaaggaaactgatgaacaccaatgatctggaggagtccaggcagctcacggaggagatccagcggcatctggatgccaggcacctcattgagaagtcagtgcgtaagatcgtctccttgctggcagcgtccgaggctgaggtggagcagctcctgtccgagagagccccgctcacggggcacagttttntacaagctttt

SEQ ID NO: 730 - DNA, 505 bp, Homo sapiens
  misc_feature 450: n = A,T,C or G
ctgggctgatgaaacggatgacctggaaggagatgtttcgaccacttggcacagtaacgatgacgatgtgtatagggcgcctccaattgaccgttccatccttcccactgctccacgggctgctcgggaacccaatatcgaccggagccgtcttcccaaatcgccaccctacactgcttttctaggaaacctaccctatgatgttacagaagagtcaattaaggaattctttcgaggattaaatatcagtgcagtgcgtttaccacgtgaacccagcaatccagagaggttgaaaggttttggttatgctgaatttgaggacctggattccctgctcagtgccctgagtctcaatgaagagtctctaggtaacaggagaattcgagtggacgttgctgatcaagcacaggataaagacagggatgatcgttcttttggccgtgatagaantcgggattctggcaaaacagatacagactggagggctcgtcctgctacagacagc

SEQ ID NO: 731 - DNA, 463 bp, Homo sapiens
  misc_feature 347: n = A,T,C or G
cctggggcttctgtcgctcaggagttcaggggtggacgcagaaatgggggaaggagagtggctacgtagagagtgagagcgagattcctaaaaagatgcacagagagaccctcagagaggccaagaaagatggtgagagggtagggaaggagagggagggagagagagagagagaagcagagggaatgggttgcactggctgaggatggtggaggagccgtctcactcccttcctaatgtctatagatcaataacgagggaagaaaggaggacagggagctgatggaaacacagcttgccaactgccaagggaagaaggtagggctggactccctgctgtggcccancccttgttaggggttggtctctcactgcagccagacaggatgatcctgggttctggggaggggtaagctgccccttgccgagttctgcaccgaataaagagtccaaacccgctgct

SEQ ID NO: 732 - DNA, 459 bp, Homo sapiens
ctgacatggatgtggggcagataggctttcacaggcagaaggatgtaaaaattgtgacagtggagaagaaagtaaatgagatcctgaaccgattagaaaagaccaaagtcgagcggttcccagacctagcagcagagaaagaatgcagagatcgtgaagagaggaatgagaaaaaagcccaaattcaggaaatgaaaaagagagaaaaagaagaaatgaagaagaagagggaaatggatgaacttaggagctattcatcactaatgaaagttgaaaatatgtcttcaaatcaggatggcaatgattcagatgaattcatgtaaaaggagaaaaggagaaaaggacctttgaaagatgtgaatgtagagacaattgcagaccttttggtttcatctgtgttctgaagcataaaatacaaccaaaattctaccttcatcctacccagaaattattgatttt

SEQ ID NO: 733 - DNA, 302 bp, Homo sapiens
cctttacttattcagtgaaagtgtctatttagactaagaggtattttagtttcctgactcgggcatgttgagtaaagctaatttgccagtcctgggtgggggcaaatcctcgagcttgatgtgtagggaagggagggggcctgaataatccctgaggagtagtagaatagcagatggaacactgagaagttatttccttgaggatagatttccacgatggaaaggaaatgagaggttctgagaggcgggctagtggcttgtactatagcataacctgccgttgctggtgtgtggcgattagg

SEQ ID NO: 734 - DNA, 343 bp, Homo sapiens
ccatgaaaggacaagtatggagatgaaagctatcacactgagaatagtgggatgtagatagaaagcacctgaattgtgcttctgaattaaccaatccaggaactgctttacctttggactttttgttatgtgagatattctttatattgttccatttgctttgggtatatgtatattgttacttgtagccaaaaagaaacctctcttagtagaaacaaagggagagttaggttattcaaaaattagtatgggacaattgaatatgcctttttctgcgggagtaggtggggagaaacttaaaggttcacttgtaaaacaataaagtactaaagaaaaaaaaaaa

SEQ ID NO: 735 - DNA, 527 bp, Homo sapiens
gacagggggagggagagcatctggacaaatacctaatgtatgaggggcaaaactttttgtattattgtttgttttgtgttcagttcaaagtcttaaccagttttattgtcaaataaactataaatgttatgggggagatcttataaatttcctgggcaagagtgtatgcatacaaagttttcacttttgtgaaatgtaatttttctgtttttgcaaagggatgaggtgattggaattgctttgaccatgctgcctttattctcaaactggcaaacttagcatgttaggtgtattaacctcatcagtcttgaagaacatgtggctcatgagtataacacttctgtagaggactccctgacaaaagtgaagaattaacttctcctccagaacaagtgcaattcagaaggcagctctgcattctaccttgcttgactggaattgtctgaagctttttctggcctcttttctctagtcggccacccctgaagtgctgaggtctaagtggtttacctcgtgctgatagatgg

SEQ ID NO: 736 - DNA, 341 bp, Homo sapiens
ctgctgtgctacaacgtcggtcagaaaatgaagagtttgttgaagtgggaagattggggccttctgattattttggtgaaattgcactactgatgaatcgtcctcgtgctgccacagttgttgctcgtggccccttgaagtgcgttaagctggaccgacctagatttgaacgtgttcttggcccatgctcagacatcctcaaacgaaacatccagcagtacaacagttttgtgtcactgtctgtctgaaatctgcctcctgtgcctcccttttctcctctccccaatccatgcttcactcatgcaaactgctttattttccctacttgcagcgccaagtgg

SEQ ID NO: 737 - DNA, 456 bp, Homo sapiens
aaaataaataaagaaaaatcttgtttcctttggcatctttagaaaataaactacagcaataaaaagaggtgattgtataaagacatgcgtaagcaaacatatggggaaaaaacagcaacttgtgtttagtatgtaataatatcagctataagagtttactgttaattaggaaagccttacaaatttttggaagaaccttcacatctttaacattacaatatatttaataatggttcttttattgcttctagtatcaagattattgagaagtcaaatgaagttatgctgacgttatgattcaaaaattatcttccaaacatttaacgattataatttaagataaataacacttaaagaaagcaaaccttttataatatgactttcaatatacagccttactttaattcagtctgattccattacatttttgttattttgtattggtcctaaaaattt

SEQ ID NO: 738 - DNA, 481 bp, Homo sapiens
  misc_feature 469: n = A,T,C or G
aaacaaacagaagattgtttttccacatagcatggattctggagatgggtggctaatggtattggttcaacaactccacggaggtaggggtcacgtcttggatccttttgccttaatctcagtgctcgttacttcatggtcccaagatggctgctgtatccccaagaatcatgtctgcgttcaaggaaggaggggtggaggaagaggaagggccaaactagctggacccgtcaccttctatcagaaagtaaaacctcgtcagaagtctgtttcctgctctctccctctgcatatcttcacttagatgcccttggcccgagccagctaccattgcacctctagctgcaaacaaagctaagacagcagggaacagaattgtcatggctgaatagaccaatcgtgttccatctactgagactggcacactgcctcctgcaataaaactgggatcccattaccaagagagaangcagaattgtgt

SEQ ID NO: 739 - DNA, 192 bp, Homo sapiens
ccttgaagggacctcagagcaaaggaagagacctgggtgtggtgaggcatcccagggcatggaagggaccggttgtgctgtgggaatccactggcccctccttggttaaaaaagcacaacacatcatacatatttaccagaccagaagcgctggccccaagtctccctaacctggtcgggggaacctcctgg

SEQ ID NO: 740 - DNA, 456 bp, Homo sapiens
taggtgccttattggtttatgacattgctaaacatctcacatatgaaaatgtagagcgatggctgaaagaactgagagatcatgctgatagtaacattgttatcatgcttgtgggcaataagagtgatctacgtcatctcagggcagttcctacagatgaagcaagagcttttgcagaaaagaatggtttgtcattcattgaaacttcggccctagactctacaaatgtagaagctgcttttcagacaattttaacagagatttaccgcattgtttctcagaagcaaatgtcagacagacgcgaaaatgacatgtctccaagcaacaatgtggttcctattcatgttccaccaaccactgaaaacaagccaaaggtgcagtgctgtcagaacatctaaggcatttctcttctcccctagaaggctgtgtatagtccatttcccaggtctgagattt

SEQ ID NO: 741 - DNA, 315 bp, Homo sapiens
ccagataaggctgacttcagtgctgatgcaagttcctttttggtccttctctggtaggcgaaggcaatatcctgtctctgtgcattgctgcggttggtcaaaatgttgacaatggtgacctcatccacacctttggtcttgatggctgtttcaatgttcaaagcatcccgctcagcatcaaagttagtataggctttgacagacccatatgcacttgggggtgtagagtgatcaccctccaagctgagcttgcacaggatttcgtgaacagtagacattttgaaggaagctgggccgtgcgccgagagctgagag

SEQ ID NO: 742 - DNA, 147 bp, Homo sapiens
  misc_feature 108, 141: n = A,T,C or G
caagacctcaggcatagagttcaagggccttgcccacggtttcagagctagttcatattcaaaagaaataaagaaaacagtgacttatcccgctacccaagcgtgtanagccgcgcgctgtactgcttccgatatgtgccncagagc

SEQ ID NO: 743 - DNA, 330 bp, Homo sapiens
ctgagagcattaagaaccaaatgactgtgaaagaatgggagaaagtgtttgagatgagtcaagataaaaatctataccacaatctttgtaccagcctgttccctactatacatggcaatgatgaagtaaaacggggtgtcctgctgatgctctttggtggcgttccaaagacaacaggagaagggacctctcttcgaggggacataaatgtttgcattgttggtgacccaagtacagctaagagccaatttctcaagcacgtggaggagttcagccccagagctgtctacaccagtggtaaagcgtccagtgctgctggcttaacagcag

SEQ ID NO: 744 - DNA, 315 bp, Homo sapiens
cccaagaggaaaagagagaaaaaagagaaaaagaagaaacggaaggcagagaagcatcgaggccgagctggggccgatgaagatgacaaggggcctagggcaccccgcccacctcaacctaagaagtccaagaaagcaagtggcagtgggggtggcagtgctgctttaggcccttctggctttggaccttctggaggaagtggcaccaagctccccaaaaaggccacaaagacagccccacctgccctgcctacaggttatgattcagaggaggaggaagagagcaggcccatgagttacgatgagaagcggcag

SEQ ID NO: 745 - DNA, 473 bp, Homo sapiens
  misc_feature 463: n = A,T,C or G
cctcagaagccaggtctttgtccttccctcctggttcctgcctccttttctcccccaaattgagtcccagaaaccagaattccttttcctcaaagcaggtcttagaaactagaattcctttctctcaaacccagccataaaacctagctaggtcactctctcccttctccctggaagatcctcattcccgagggggatacccaggggaaggggaattgtacagagcggctttgctgggtttcccgactctgtccatcaccgttaggccagatcctttgtgtccaatcacatttctgcgtggatgttcattcatcaaacctaaatacaaaaataaacgtttttatggcctctttttaccagctccgaggtgattttcatattgaattgcaaattcgaagaagcagcttcaaacctgccggggcttctcccgccttttttcccggcggtgggagaagtagattgnagccagttga

SEQ ID NO: 746 - DNA, 510 bp, Homo sapiens
  misc_feature 20, 289, 504: n = A,T,C or G
tttttttttttcaaactganaaaggttttacttttaagacaaaaaaaatagcattaacacacatccaaatgccagtgcaggagttcactgggtttataaaagagaaaactaaactcaagtgtcaaataaaaactggagccgtcaagaatgactgcttgtggcaacacaggtgtaacatgtgcttgtctaaagtcgttctgtgtttgtggatatgtggaaatgcatgacgagggaaacgatgcaaggcaaaatgacaggtgctcaaagctttaagatccttttcttcacncttgtgtgctcttgttttgcttttgagaattagggtaattcgcaggtcattttacaaagaactgtaatatcaaagaacacttccaaacggctaaaataggctcaaggtcactattaaagtgataaagggaggtccgtgggggaaaagtttgtgttctcaaagccagatttcacaccatggcaggcactaaatctagttacatgtgcttgcagtanaaaaag

SEQ ID NO: 747 - DNA, 312 bp, Homo sapiens
ctgcctgcctgccagaggccaagcattcctaagcgtgggctgggggaggccctgcccctctgtagcagcagagcagacagggcagtgggagaaccatgtgggtaggagggcatcaggtctcaagagcctctcccctgctcaggactgggtctagacaaggccacgtgtgatagggtggtaagccctgggccatatggaggagcctggggcccatcttggttctgctgctgagttgctgggtggctttaggcaagtcccttcttgtcccttggtcactctgtttcctggctagcactgccagcaaggcctcca

SEQ ID NO: 748 - DNA, 502 bp, Homo sapiens
  misc_feature 476: n = A,T,C or G
ccaccacatcgaagaatgccaatgcctccctggtgtactccttcctgtataagacaatagaggtattctgcgaatacttcaaggagctggaggaggagagcatccgggacaactttgtcatcgtctacgagttgctggacgagctcatggactttggcttcccgcagaccaccgacagcaagatcctgcaggagtacatcactcagcagagcaacaagctggagacgggcaagtcacgggtgccacccactgtcaccaacgctgtgtcctggcgctccgagggtatcaagtataagaagaacgaggtcttcattgatgtcatagagtctgtcaacctgctggtcaatgccaacggcagcgtccttctgagcgaaatcgtcggtaccatcaagctcaaggtgtttctgtcgggaatgccagagctgcggctgggcctcaatgaccgcgtgctcttcgagctcactggccgcagcaangaacaaatcagtagagctggaggatg

SEQ ID NO: 749 - DNA, 434 bp, Homo sapiens
cctggagataaagtccctccaattaaaccaaacgctggggaagaatctgtcatgaatcttgacaaattgagatttgctgatggaagcataagaacatcggaactgcgactcagcatgcagaagtcaatgcaaaatcatgctgccgtgttccgtgtgggaagcgtgttgcaagaaggttgtgggaaaatcagcaagctctatggagacctaaagcacctgaagacgttcgaccggggaatggtctggaacacggacctggtggagaccctggagctgcagaacctgatgctgtgtgcgctgcagaccatctacggagcagaggcacggaaggagtcacggggcgcgcatgccagggaagactacaaggtgcggattgatgagtacgattactccaagcccatccaggggcaacagaagaagccctttgaggagca

SEQ ID NO: 750 - DNA, 493 bp, Homo sapiens
ccaagacagctaacaaggaccacttggttacagcctataaccatctttttgaaactaagcgttttaagggtactgaaagtataagtaaagtgtctgagcaagtaaaaaatgtgaagcttaatgaagataaacccaaagaaaccaagtctgaagagaccctggatgagggtccaccaaaatatactaaatctgttctaaaaaagggagataaaaccaactttcccaaaaagggagatgttgttcactgctggtatacaggaacactacaagatgggactgtttttgatactaatattcaaacaagtgcaaagaagaagaaaaatgccaagcctttaagttttaaggtcggagtaggcaaagttatcagaggatgggatgaagctctcttgactatgagtaaaggagaaaaggctcgactggagattgaaccagaatgggcttacggaaagaaaggacagcctgatgccaaaattccaccaaatgcaaaactcac

SEQ ID NO: 751 - DNA, 454 bp, Homo sapiens
ccttatttctcttgtcctttcgtacagggaggaatttgaagtagatagaaaccgacctggattactccggtctgaactcagatcacgtaggactttaatcgttgaacaaacgaacctttaatagcggctgcaccattgggatgtcctgatccaacatcgaggtcgtaaaccctattgttgatatggactctagaataggattgcgctgttatccctagggtaactcgttccgttggtcaagttattggatcaattgagtatagtagttcgctttgactggtgaagtcttagcatgtactgctcggaggttgggttctgctccgaggtcgccccaaccgaaatttttaatgcaggtttggtagtttaggacctgtgggtttgttaggtactgtttgcattaataaattaaagctccatagggtcttctcgtcttgctgtgtcatgcccgcctctt

SEQ ID NO: 752 - DNA, 223 bp, Homo sapiens
cctttcctacagggtctgagaaggccaccgcagtcatttcttcccttctgtcagacataattcctcagtttagccttcccacctctatacagtctgataacagaccagccttcattagtcaaatcagccaagcagtttttcaggctcttagtattcagtgaaacctttatatcccttacggtcctccgtcttcaagaaaagtagaacggactaaaggtctttt

SEQ ID NO: 753 - DNA, 422 bp, Homo sapiens
ctgcagccgctgcagctactcctgctgtccgcaccgttccacagtataaatatgctgcaggagttcgcaatcctcagcaacatcttaatgcacagccacaagttacaatgcaacagcctgctgttcatgtacaaggtcaggaacctttgactgcttccatgttggcatctgcccctcctcaagagcaaaagcaaatgttgggtgaacggctgtttcctcttattcaagccatgcaccctactcttgctggtaaaatcactggcatgttgttggagattgataattcagaacttcttcatatgctcgagtctccagagtcactccgttctaaggttgatgaagctgtagctgtactacaagcccaccaagctaaagaggctgcccagaaagcagttaacagtgccaccggtgttccaactgtt

SEQ ID NO: 754 - DNA, 502 bp, Homo sapiens
  misc_feature 496, 497: n = A,T,C or G
ccatcttcggaccccccaacaccctctacgaaggcggctacttcaaggcgcatattaaatttcctattgactacccctattcaccacctaccttcagattcttgaccaaaatgtggcaccccaacatttatgagaatggagatgtatgcatttcgattcttcatccgcctgtagatgacccacagagtggagaactgccttctgaaaggtggaatcctactcagaatgtgaggactatcctattaagtgtaatctcactgcttaatgagcccaacaccttctccccagccaatgtcgatgcttcagttatgttcaggaaatggagagacagtaaaggaaaagacaaagaatatgctgaaattattaggaaacaagtttcagccactaaggccgaagcagaaaaggatggagtgaaggtccccacaaccctggcggaatactgcatcaaaactaaaagtgcctttcaatgacaacagctcagatttgctttacgacnncttgt

SEQ ID NO: 755 - DNA, 322 bp, Homo sapiens
ctgatcaagactggagacaaagtgggagccagcgaagccacgctgctgaacatgctcaacatctcccccttctcctttgggctggtcatccagcaggtgttcgacaatggcagcatctacaaccctgaagtgcttgatatcacagaggaaactctgcattctcgcttcctggagggtgtccgcaatgttgccagtgtctgtctgcagattggctacccaactgttgcatcagtaccccattctatcatcaacgggtacaaacgagtcctggccttgtctgtggagacggattacaccttcccacttgctgaaaaggtcaagg

SEQ ID NO: 756 - DNA, 268 bp, Homo sapiens
aaagaaaaaaagtaaatccactttatggtggacttcagctatggacaaatttgggatcagtgttctccagtctgaacatagtcttctgttacctgggagagagtggtcaggtactgccagctcagggcagccaaaagcatgacaaatgacaggtagatgggggagtagtggcttcgggaaatcagctgacagttgggaagattctgcgtccggatggtggagatgatctgccttgttttgctagaagatgggtctgagtcggggattc

SEQ ID NO: 757 - DNA, 391 bp, Homo sapiens
  misc_feature 322, 354, 366: n = A,T,C or G
cctgacattcctgccttcttatattaataagaaaaataaaacaaaatagtgttgaagtgttggggcggcaaaaatttttgggggtggtatggagagagaatgggcgatgtttctcagggctgcttcaagcgggattaggggcggcgtgggaacctagagtgggagagattaagctgaatggaagatcttgtggtaaggggtgatattgtggggttgttagaagaaacatttgtcgtatagaatgattggtgatggcctggatacggttttgtatgaattgaaaaatggaataagagaaggagagaaacaggtataaaaggtntaagaattgggaggacctagacatctgattanagagtgcctaangaggttcagcatagtccttccagca

SEQ ID NO: 758 - DNA, 450 bp, Homo sapiens
  misc_feature 450: n = A,T,C or G
ccacagctaacatcattgcagcacctttactccttcggcttctttttgccagcaccaacattggcctttgcagtccccctgactttcttcattctgttcttgcgttcctttcgttgctttcttgaggtctttttcttctcatacaggccatgtcttgcaagtctatgtttgggttcatttttctttgcataatccagggaatcataaatcatgccaaagccagttgtcttgccaccaccaaaatgagttctgaatccaaatacaaagatgacatccggtgtggtcttgtacattttggctagtttttcccgaatttctgtcttaggcactgtcgccttcccggggtgaaggacatcaatgaccatttgtttcctctgaagtagtcggttggtcatgaactttctagtgcggatagttacggtgtcgttcatgatggcgatctatcttcan

SEQ ID NO: 759 - DNA, 419 bp, Homo sapiens
ccagccatctggtttcagccggaagctaacaccctcattctgagtccaggctagtgggtggtggctgaggacccagttggttgaggagtccaactagaaaccaggagaggtagcagaataattaaacccctataggggtggcaagggcctctggccctgggtggaatgtcccatttccttcatcactgagtgggcttccccaaggcagaaaggtttgtcccggagcaagaattttgtttgaatgcgtgtaacttaaattaaccttgtggacctctgctcagctccgctcggctctgcccgatgagctccatccaggctccgcttgccggtggaaaaggctccttagaagccggcaatgagctccatccccacgcggtgccagtgtgccttccgctcacccctcggaggggtgatgaagg

SEQ ID NO: 760 - DNA, 396 bp, Homo sapiens
ctgaggccgagcccaactaggtcctgggcacccctgcaggtgggagtggtccttgtcctcctggtatccagcagacacccccctctccccaccagccccattctcaggtcctttcctctttgtcaccaacaccaagaatctgtccagggttcttggcttatcttttatctcttttcactcctagagaggaattgcaattgactcagaatgacacattttggcaccacgtgtgtagaaagcccccactgttagatgatagcctcgtgaaattcatgtttctgtattctcctatttcttttcaaaaactaattttttttttagtgtaataaatcctaagagggaactgatttaagaaacaaggccgccaaacaaaggcagcagttccgactccagcag

SEQ ID NO: 761 - DNA, 362 bp, Homo sapiens
ctggtgcccattgctgttgttcttgatgccagcagctattttacagaagcagtccaggaagactttatcatcaccactgtgatcttcatcatatttatcaaagttgcagtatggtttgaatcgctccaccaagatctgcattttctccacctctccaaaggaaaggtacgggatgatgcgaagcaggccctggagcacactggggttggagcgaacaaaggtgctgttgatctggtccaagagcatcaccagttgatccttgtcacctgtcaggaggaggttgcccttgtcctcactcaggggctcagcattggactcatctagaatgatctccatgatgctaagcacctgctcagccacag

SEQ ID NO: 762 - DNA, 439 bp, Homo sapiens
ctgaccagcaccatggcggttggcaagaacaagcgccttacgaaaggcggcaaaaagggagccaagaagaaagtggttgatccattttctaagaaagattggtatgatgtgaaagcacctgctatgttcaatataagaaatattggaaagacgctcgtcaccaggacccaaggaaccaaaattgcatctgatggtctcaagggtcgtgtgtttgaagtgagtcttgctgatttgcagaatgatgaagttgcatttagaaaattcaagctgattactgaagatgttcagggtaaaaactgcctgactaacttccatggcatggatcttacccgtgacaaaatgtgttccatggtcaaaaaatggcagacaatgattgaagctcacgttgatgtcaagactaccgatggttacttgcttcgtctgttctgtgttggtttta

SEQ ID NO: 763 - DNA, 449 bp, Homo sapiens
cctcggaggagagcgccctcaaccacctccagaacccgggcgacgcggccgagggccgggcggccaagaggtgcgagaaggccgaggagaaggccaaggagattgcgaagatggcagagatgctggtggagctggtccggcggatagagaagagcgagtcgtcgtgagcgcggtcggcggtttccagccaatggattctggtcaactggtggagattggctgacaccctggagaagccgaaaccagagagccttttgttttctcttttttcctgtctatgctctgtctcacttaacactacgttttctgctatggtctgtggttgatgacctcaatatgagtttcgattgttaacgtgtttttgtttggaaagtaattttgtttgaaaatgctctcacatacaggaattagggcctagattgtaagctcttgcagcagtcacatttgtt

SEQ ID NO: 764 - DNA, 500 bp, Homo sapiens
  misc_feature 431, 455: n = A,T,C or G
ccaggctggtctcaaactcctgacctcaggtgatccgcccaccttggcctcccaaagtgttgggattacaggcaggagccaccgtgcccggccgaatcttattcttactggttactgtagaataatttcagtcctgtcccttatgattctgaatccaattatataaaggaaaataacttttcatgtgaatgtaaaatgtttacacacataagtaagacagtttacaagacaaactggtctacacagacaaaggtctatattaaagttcaatctggaccctagaattcttgtcatgggcctcttgtgaagagtctgccctactcaggaatgggcacatgggttaacaattttcacttatttactgagggagtggagtatagatgtagggaggtgaaattaccattcctgggaataaatgtaggattttaatngaatgatagaatttattgtacaantcacattggtgagtcttattcaggtattaggcttaactatttaga

SEQ ID NO: 765 - DNA, 363 bp, Homo sapiens
ctggcttcactgctcaggtgattatcctgaaccatccaggccaaataagcgccggctatgcccctgtattggattgccacacggctcacattgcatgcaagtttgctgagctgaaggaaaagattgatcgccgttctggtaaaaagctggaagatggccctaaattcttgaagtctggtgatgctgccattgttgatatggttcctggcaagcccatgtgtgttgagagcttctcagactatccacctttgggtcgctttgctgttcgtgatatgagacagacagttgcggtgggtgtcatcaaagcagtggacaagaaggctgctggagctggcaaggtcaccaagtctgcccagaaagctc

SEQ ID NO: 766 - DNA, 295 bp, Homo sapiens
gtgcaaccgagagacaacattagattagctgtgcactttgcaagaagaggggaagaggacaatacgttcatcctgagagctgcttctgagaacctcagggaagaagtctagaaccctgatctacataaagtgacagatgacggactcgttgtggaggactcctgaagtagtgtccctgattagaatgctgatttcttccccaaaggtgatgtgggcacagaactgagctgtgtgaatgggaggccaaataagctctgctgaatttgctctggcagcccaagtccttaaggtgagg

SEQ ID NO: 767 - DNA, 210 bp, Homo sapiens
ctggttatccgagaagttccgaggattctccttggatttcttagggaaccagttgggatccccagagaagagcccatcatctcgggctactgccagcccacccagattcatcagcgtccgctgcacacaggccatgttctttccttcccagaggtccacagtttggaagatgtcagtggtgttaatgccatagcgctcagacctgcccgg

SEQ ID NO: 768 - DNA, 460 bp, Homo sapiens
ccaattgaaacaaacagttctgagaccgttcttccaccactgattaagagtggggtggcaggcattagggataatattcatttagccttctgagctttctgggcagacttggtgaccttgccagctccagcagccttcttgtccactgctttgatgacacccaccgcaactgtctgtctcatatcacgaacagcaaagcgacccaaaggtggatagtctgagaagctctcaacacacatgggcttgccaggaaccatatcaacaatggcagcatcaccagacttcaagaatttagggccatcttccagctttttaccagaacggcgatcaatcttttccttcagctcagcaaacttgcatgcaatgtgagccgtgtggcaatccaatacaggggcatagccggcgcttatttggcctggatggttcaggataatcacctgagcagtgaagccagacctgc

SEQ ID NO: 769 - DNA, 251 bp, Homo sapiens
ccaattgatttgatggtaagggagggatcgttgacctcgtctgttatgtaaaggatgcgtagggatgggagggcgatgaggactaggatgatggcgggcaggatagttcagacggtttctatttcctgagcgtctgagatgttagtattagttagttttgttgtgagtgttaggaaaagggcatacaggactaggaagcagataaggaaaatgattatgagggcgtgatcatgaaaggtgataagctcttc

SEQ ID NO: 770 - DNA, 493 bp, Homo sapiens
  misc_feature 478: n = A,T,C or G
cacgccgccgcttgtgctgcagccatgtctctagtgatccctgaaaagttccagcatattttgcgagtactcaacaccaacatcgatgggcggcggaaaatagcctttgccatcactgccattaagggtgtgggccgaagatatgctcatgtggtgttgaggaaagcagacattgacctcaccaagagggcgggagaactcactgaggatgaggtggaacgtgtgatcaccattatgcagaatccacgccagtacaagatcccagactggttcttgaacagacagaaggatgtaaaggatggaaaatacagccaggtcctagccaatggtctggacaacaagctccgtgaagacctggagcgactgaagaagattcgggcccatagagggcctgcgtcacttctggggccttcgtgtccgaggccagcacaccaagaccactggccgccgtggccgcaccgtgggtgtgtccaagaanaaataagtctgtagg

SEQ ID NO: 771 - DNA, 552 bp, Homo sapiens
aaatatgaatggcaaattttggtttttagcttttacattttattatcttaattttataaatgctaatatttcttttgtgataagttatagcatctcataaagtttgttctatttgaagttttttagagtacttgagaaatgaatttagtctgcaggtagtaagtatgctactaaaatacgttagatctaaatccttttatttggtataaaaatgcaatattgagaatcaaaacttgtttttaagagaactatagattctacacaacctgatttcaagtaattattcatagtatttatagttgtcttggcaaagtgattgtaaaattctgtaggacctattcacacttcttccttcttccatatacttctctggttttccccatagttcccctataatttcaagtttgttgaaacctgttaattttagtgggggattagaagaaaaacttggtggtttcttagcatgatggtgtatgtatgtggtaatggaaagtctgtaaaagtaaatatagtgtagcaaaaaagatttcactgagtattttagatactagt

SEQ ID NO: 772 - DNA, 487 bp, Homo sapiens
  misc_feature 444, 486: n = A,T,C or G
aaaatttcatcataggaatttgggtgaccttttgcactcagtattaaaaaaaaccatcaagttgctctttggaacagtagcatttaggtttgtttttttttttttgtcacacttgtttatttctttgggatgttgctgtgtgtcatggaagaaacgctcccctgaaaactgtaaccaaacaaagtttggttaaaacaaagttggttcctttgttttcatggaaatgtcagacaactatgaaaagctaaggaagcatgttgaactgaaggtctggctttggtaaattaggcagagatgttctcagcagcaaacaggtaaaatctgacatcgagaagcattattttaatgtaggaccagttataatcttaaagaactgactaggttctaaaataatagaactgagaaataggactgagaaatgaccaacatcaagtataatacggnacacttagcacttgtttctatagaaaacatttcaaatcaagnt

SEQ ID NO: 773 - DNA, 490 bp, Homo sapiens
ctgcttccattggtgggtcatttttgctgtcaccagcaacgttgccacgacgaacatccttgacagacacattcttgacattgaagcccacattgtccccaggaagagcttcactcaaagcttcatggtgcatttcgacagattttacttccgttgtaacgttgactggagcaaaggtgaccaccataccgggtttgagaacaccagtctccactcggccaacaggaacagtgccaataccaccaattttgtagacatcctggagaggcaggcgcaagggcttgtcagttggacgagttggtggtaggatgcagtccagagcctcaagcagcgtggttccactggcattgccatccttacgggtgactttccatcccttgaaccaaggcatgttagcacttggctccagcatgttgtcaccattccaaccagaaattggcacaaatgctactgtgtcggggttgtagccaattttcttaatgtaagtgct

SEQ ID NO: 774 - DNA, 476 bp, Homo sapiens
  misc_feature 422: n = A,T,C or G
ccactagaggtctgtgtgccattgcccaggcagagtctctgcgttacaaactcctaggagggcttgctgtgcggagggcctgctatggtgtgctgcggttcatcatggagagtggggccaaaggctgcgaggttgtggtgtctgggaaactccgaggacagagggctaaatccatgaagtttgtggatggcctgatgatccacagcggagaccctgttaactactacgttgacactgctgtgcgccacgtgttgctcagacagggtgtgctgggcatcaaggtgaagatcatgctgccctggggcccaactggtaagattggccctaagaagcccctgcctgaccacgtgagcattgtggaacccaaagatgagatactgcccaccacccccatctcagaacagaagggtgggaagccaganccgcctgccatgccccagccagtccccacagcataacagggtctcctttggcag

SEQ ID NO: 775 - DNA, 419 bp, Homo sapiens
ccagcttcttgaccagttttttattcttgttgagttttttcagcgcctcgatgtccatgtgggggatatccacggccttagcctcgtcacagtgctgctggtcccccaggacacacacagagaacttagggcggggagtggacttaagcctgacggtgcccgagaagcgcttgtccttctggggatcatagttcttcaagctgatctgcaactccaccgtctccaggaacttgcggcgcttgcgcctttagtgatgatgattaaaggtggtggctgtggccttgaaaatagtcatgtgaaaactcatcaccttaaggtgttaagtgtaaggatcttcacgatgaaatttctgtaaatggtgcagtcagcctcagtttccaaagccggaaaaggatcctctagtagccacggtgtggcag

SEQ ID NO: 776 - DNA, 400 bp, Homo sapiens
ccacagacgtcattcgctggactccctgggcactaaatgagtgtctagcatccttaaggctgctcaacacacagccccagactctgaatatgattccaagaaatattctgaaaaaagtcacatcgctggaataaacagtttcccaagataactgctttgaaaaccagtcccgttagtttctaaaagcccacctacggcaccttccttccatcagagtctgctgcccgggtgggctgggaaggagggagatacaaagaagaaagtaggcatgatcactgggtcggttcccaagccaccctcaccctccaagaaggcatgaatggaacaaccccgagaacagagcacgtgtgaagaaccaacacgacaggcacgggatggcagcactggtggaagggaggca

SEQ ID NO: 777 - DNA, 398 bp, Homo sapiens
ccaaaggggtctctagctgctgctctgctgctcctgctcatggatgagtttggcgatggggccggtgatgccgcctatcaaggtccagtactcatcgaagctgatgcgcccatcatgattggcatccaggttctggatgagcttatccgcagccttccggttccctgtgtccgacagcatgtggttcagctctttctggagcatctcgcggaagctgctcttgctgatcttgttcttgaccaggctgtacttagacacatatttgtagaagttttccaccaggacaatgactgccttctccagctccgtgtagcagtctgacatctccctgcttcgcctgctggcggggcctgctgcctcagtctgcctcctctccagcagggctctggggcctgggc

SEQ ID NO: 778 - DNA, 462 bp, Homo sapiens
atcgccatcatgaacgacaccgtaactatccgcactagaaagtccatgaccaaccgactacttcagaggaaacaaatggtcattgatgtccttcaccccgggaaggcgacagtgcctaagacagaaattcgggaaaaactagccaaaatgtacaagaccacaccggatgtcatctttgtatttggattcagaactcattttggtggtggcaagacaactggctttggcatgatttatgattccctggattatgcaaagaaaaatgaacccaaacatagacttgcaagacatggcctgtatgagaagaaaaagacctcaagaaagcaacgaaaggaacgcaagaacagaatgaagaaagtcagggggactgcaaaggccaatgttggtgctggcaaaaagaagtgagctggagattggatcacagccgaaggagtaaaggtgctgcaatgatgttagctgtgg

SEQ ID NO: 779 - DNA, 288 bp, Homo sapiens
ctgacaagcccttgcgcctgcctctccaggatgtctacaaaattggtggtattggtactgttcctgttggccgagtggagactggtgttctcaaacccggtatggtggtcacctttgctccagtcaacgttacaacggaagtaaaatctgtcgaaatgcaccatgaagctttgagtgaagctcttcctggggacaatgtgggcttcaatgtcaagaatgtgtctgtcaaggatgttcgtcatggcaacgttgctggtgacagcaaaaatgacccaccaatggaagcag

SEQ ID NO: 780 - DNA, 470 bp, Homo sapiens
  misc_feature 400: n = A,T,C or G
gggcaacaagagcaaaacttcgtctcaaaaaaagaaaactggctagaatgcacttcaacttaagtcctgggagctacgctaattcatggagaaccacagaggtttaataggcatttctatacctggatcagccccaaggacagtattaccctgtactgcccttcctattactattttcagtcatttactaatattgggctgtagtactttcacgtttaagctttggctattcagagctcactacgtttaatcttcagttacctgaatggtgtttaccttctggtgtggatcatcccggcttgtgttagtgctctctctttggaagaagccaggatttaagatcgagttagcctagatgtggcccagcagggtacagaaggggaaaggctgcagaaaaccnggcgtattttcgtgcaaagaggtttttgcgccatttatttatggttttcaccgtcgtatgagaggaccag

SEQ ID NO: 781 - DNA, 520 bp, Homo sapiens
  misc_feature 99: n = A,T,C or G
aaatcaataagtaatctaggactagcattatgtttgctagacctggcatttgctcggtacataaggttcaaagtttcctttcctttttttatttatttnatattttgcaatgttttttttccataatatttaagtttttcgatgtttagatatttttcttcggtgaagcacaagtttcttttcatggtccctgatcaattttaaacagttggaacaccggtggcactgttaactgctttctgggcagcctctttagcttggtgggcttgtagtacagctacagcttcatcaaccttagaacggagtgactctggagactcgagcatatgaagaagttctgaattatcaatctccaacaacatgccagtgattttaccagcaagagtagggtgcatggcttgaataagaggaaacagccgttcacccaacatttgcttttgctcttgaggaggggcagatgccaacatggaagcagtcaaaggttcctgaccttgtacatgaacagcaggctgttgcattg

SEQ ID NO: 782 - DNA, 437 bp, Homo sapiens
caggtctgcatacctgcaacacttatgctaccgcaatgacaaggtgaagactgacgtgcggaagctcaagggcatcccagtactggtgggattgttagaccatcccaaaaaggaagtgcaccttggagcctgtggagctctcaagaatatctcttttggacgtgaccaggataacaagattgccataaaaaactgtgatggtgtgcctgcccttgtgcgattgcttcgaaaggctcgtgatatggaccttactgaagttattaccggaaccctgtggaatctttcatcccatgactcaatcaaaatggagattgtggaccatgcactgcatgccttgacagatgaagtgatcattcctcattctggttgggagcgggaacctaatgaagactgtaaaccacgccatattgagtgggaatcggtgctcaccaacacag

SEQ ID NO: 783 - DNA, 492 bp, Homo sapiens
aaaagttgaggagtttattagggaaatatgagaggcatagacactccaagtgacagaaagaaaagtctgaaaatgtcccttcaagccaagtgggggcctggccttgacctctccaaatcaacaagaaactggtgggttagcaacaacattctctggcagccacattgccagggcatgagtgtcttgaccaggactgccccgcacttcccaccaaaggtggggaggagacaaagactgttcacagaagcagtgcaaaggcaatgagaactttaaggaaagtttgagagagagagaaagaaagatagaggtgaggaggaccttcacaaagagtcccaggcttttggctgtgaatgtctcaaatacattgacaagtagatgtataaaatgttactgaaaaggtaaaatgcctaacgtcgtttccaacggttcctctgaacttcttcccacataccacaccacaccccagatggcagagcccaaaggccacacttt

SEQ ID NO: 784 - DNA, 516 bp, Homo sapiens
ccaaaagaagtaagacagcttgctgaagatttcctgaaagactatattcatataaacattggtgcacttgaactgagtgcaaaccacaacattcttcagattgtggatgtgtgtcatgacgtagaaaaggatgaaaaacttattcgtctaatggaagagatcatgagtgagaaggagaataaaaccattgtttttgtggaaaccaaaagaagatgtgatgagcttaccagaaaaatgaggagagatgggtggcctgccatgggtatccatggtgacaagagtcaacaagagcgtgactgggttctaaatgaattcaaacatggaaaagctcctattctgattgctacagatgtggcctccagagggctagatgtggaagatgtgaaatttgtcatcaattatgactaccctaactcctcagaggattatattcatcgaattggaagaactgctcgcagtaccaaaacaggcacagcatacactttctttacacctaataacataaagcaagtgagc

SEQ ID NO: 785 - DNA, 457 bp, Homo sapiens
ccacaaacacctctcggcggccaggctgtttcagtcgaccacggcacacttccccaaattccccagctccgatcacctcctcgatcttgacgcaggacacgtcgatctccttggcaaactcccgaacagcctcattagggtcctcgtaggtaaaagggtcaatataaaccttcattccaggagcaactggagggagaagaggtgggcgtgagagggtaacgtcaagccagcctctccctgcgatgggcacagctccagcaggctccctgctgagcccagccccatattcctctgtgttgctgccctaatcctccagctcccatgagaactcctggtgaccataaaggctagacacctaggattctactcctagtttttctctctcatctctcatcacatccagacctctctcagattcatgcctcccctggttcccactgccccgaccttgtccagg

SEQ ID NO: 786 - DNA, 306 bp, Homo sapiens
aaaatgagccgggcgcggtgactcacgcctgtaatcccagcactttgggaggccaaagcaggcggatcatgaggtcaggagatcaagaccatcctggctaacacggtgaaaccccgtctctactaaaaatacaaaaaattagccgggtgtggtggcgggcacctgtagtcccagctactcgggaggctgaggcaggagaatggcgtgaagccgggaggtggagcttgcagtgagccgagatcacaccactgcactccagcctggacaacaaagcaagactctcaaaaaagaaaaaaattttttttt

SEQ ID NO: 787 - DNA, 480 bp, Homo sapiens
ctgctgcttcagcgaagggtttctggcataaccaatgataaggctgccaaagactgttccaataccagcaccagaaccagccactcctactgttgcagcacctgcaccaataaatttggcagcagtatcaatgtctctgctgattgcactggtctgaaactccctttggattagctgagacacaccattctgggccccattaaataccgtagagccctctccagtcctactagcctctggtcgagataacactgatgcagaaattggtctgtatgcaactctggatccagctcggatcagagctgctcctgctgctgctgcagccccagctaaggttgaagccaaggaagagtcggaggagtcggacgaggatatgggatttggtctctttgactaatcaccaaaaagcaaccaacttagccagttttatttgcaaaacaaggaaataaaggcttacttctttaaaaaaaaaaaaaaaaa

SEQ ID NO: 788 - DNA, 379 bp, Homo sapiens
ccttctttggctccacctagtatgataatcatgggttctgttttagttgatgagaagtggctcctatgaatgcctctgctcaatttctttttattttactttattttatttttaggggtctcgccaactcctgggctcaagtgattctcctgcttccacctccccacagtgctgggattacaggcatgagccaccacgcctggctctctgttcttttcagtgtctccgtgccatcagtcagcagtgcttacatgtttagcatattgtcatgcagtttctcttctgttcccacgagatatttttggacaaaaaattgacaaaagtacatgtgtttttccccacctatcccttagaaaacctaatgtgtactgctattttt

SEQ ID NO: 789 - DNA, 262 bp, Homo sapiens
ccaaaaaaattaaacaaaatctcttggtttcctttacagtttctttttttgcgttttatttttttcaaattgcattttacagtagaaatgcagaccactttggatagctatggctcgatacttctgggtgccctcctcctaagacatcctcttcttacattccactgaacagaaaaccatcccttctactggcatgaacttctgcccaatgaggcatttgctgcagcaagagcacagaaagcactctgtggatgcatgccag

SEQ ID NO: 790 - DNA, 365 bp, Homo sapiens
cctacagacttatttcttcttggacacacccacggtgcggccacggcggccagtggtcttggtgtgctggcctcggacacgaaggccccagaagtgacgcagccctctatgggcccgaatcttcttcagtcgctccaggtcttcacggagcttgttgtccagaccattggctaggacctggctgtattttccatcctttacatccttctgtctgttcaagaaccagtctgggatcttgtactggcgtggattctgcataatggtgatcacacgttccacctcatcctcagtgagttctcccgccctcttggtgaggtcaatgtctgctttcctcaacaccacatgagcatatcttcggcccacac

SEQ ID NO: 791 - DNA, 425 bp, Homo sapiens
  misc_feature 287: n = A,T,C or G
ttggtgctccccctgtgatgagaaaagggttactgttgcaggtgctaaggaaggctgctcttctgtcactctgaagttgcttggagggatgtccccatgcagactctctcccagccctccactcagggaaggtctgtctgtacccactgccctctatagcagaaaacttgcactcctgaatgcttttttttttttttttttcaagaaagaagtggctgtggactcaactagattcttggtttgaaaaagccaaaacatattggtcactgattgtcacattgggttanaaatgtccattcatgatctcccttaagctgcacacaaccctatgaaataactaccattatctaccctattttgctaaagctcaaagagattaaataatgttgacagggatcctagccttgaactcactgaaggtgtta

SEQ ID NO: 792 - DNA, 427 bp, Homo sapiens
gtctttacaaaattcctgacaggtggttactgaatctctctatgaactttccattcaaaactttccaagtttttccttatgtggaaccgaaatctttctttctcccgtgaaactttactactatcagataattgaagacagatctctttgtattctcttcaagcccaaaccaattctgttccttcaatctaaatagtggtaatatgaatgtttaagaaatgaaataagaaacatgtgcaggcactttggaaggtgctaagtgactgccctaaggaatgaaaagcaagggccaggtgggagtagcccagcgaaggcacttgggctgccaggaacaggaggcgtgggaaactctggcttaggaaaacatgaacacaggggcaacagaggcaaactgttgttcgagttaaatataaatctcaggctcttt

SEQ ID NO: 793 - DNA, 253 bp, Homo sapiens
aaatccactagccatgctcaaaaaaaaatattcttcatgttttaattttatacaatggctagcaggcaccttagtaaccagccagaaatcaatttcaaccaccatcaacccctaaactacagtaccaggatggctggctaaagaaaggaaacggactggctgcagtctgacgcgtgcccagtacaaggtgtctggctgactttgtcctaaataaggctaacattagtgaactaagaacagcgtcacgtggtgg

SEQ ID NO: 794 - DNA, 373 bp, Homo sapiens
gtccctatgaattgtacgtttcagagaaattttttttcctatgtgcaacacgaagcttccagaaccataaaatatcccgtcgataaggaaagaaaatgtcgttgttgttgtttttctggaaactgcttgaaatcttgctgtactatagagctcagaaggacacagcccgtcctcccctgcctgcctgattccatggctgttgtgctgattccaatgctttcacgttggttcctggcgtgggaactgctctcctttgcagccccatttcccaagctctgttcaagttaaacttatgtaagctttccgtggcatgcggggcgcgcacccacgtccccgctgcgtaagactctgtatttggatgccaatccacagg

SEQ ID NO: 795 - DNA, 442 bp, Homo sapiens
aaaagtagttagcatttaatgaaactccctccatgtggcttcaagccaccaggacacaggcccccccaacactcttaatcttctcctcagctcttctgctgaagaatttggccttcacgatgacaggctgctttgggagctttccctttcccagaactttatagtagcccgatcgcaccacatcaatgatgggagcagccccagtcttgtttttagcagcattcacccgtgtctgttcactgaccaaagtccacaatttgtcaaggttgacagttgggcagaagctctggttcctctttaagtggtaatgcttcataccaactttcccaaagtagcctgggtggtatttgtcgaagttgatccggtggtgatgcagaccaccagcattaccgcggccgccggggtgcttccggtgcttgcctatgcggccgtggccgtggct

SEQ ID NO: 796 - DNA, 358 bp, Homo sapiens
  misc_feature 316: n = A,T,C or G
ccttgagcttgggccgggcactgaggcgccccacatatgctgagagcagggggaacgcatccaggcagccaggggctaggacctcatggatcagcagcaagtccagcaggttgtagtcagcgaaggagatctggtctcccacaatgaaggtcttgcctccctggttctgggacagcagggtctcaaaaggcttcagttgcccgggcagtgccttcacatagtcatccttgcccgcctcatagttggtgtagatgagggagatgtatttgcagcggaggtcctccacgccgtcattcaccatgtccaccagggctgnctcctgctggtccttcccatagagcccaagggtgcggcccag

SEQ ID NO: 797 - DNA, 83 bp, Homo sapiens
aaaattaaaattaaatcccctccctccagcacacaaaaaaaaaaaacacacaacattagaggaatgccaaaaatattctctat

SEQ ID NO: 798 - DNA, 399 bp, Homo sapiens
cggaaaatagcctttgccatcactgccattaagggtgtgggccgaagatatgctcatgtggtgttgaggaaagcagacattgacctcaccaagagggtgggagaactcactgaggatgaggtggaacgtgtgatcaccattatgcagaatccacgccagtacaagatcccagactggttcttgaacagacagaaggatgtaaaggatggaaaatacagccaggtcctagccaatggtctggacaacaagctccgtgaagacctggagcgactgaagaagattcgggcccatagagggctgcgtcacttctggggccttcgtgtccgaggccagcacaccaagaccactggccgccgtggccgcaccgtgggtgtgtccaagaagaaataagtctgtagg

SEQ ID NO: 799 - DNA, 67 bp, Homo sapiens
cctcccaagcccaggtggacaagtcagactatgacatggtggattatctgaatgagctaagggaaag

SEQ ID NO: 800 - DNA, 456 bp, Homo sapiens
  misc_feature 426, 427, 454, 456: n = A,T,C or G
cctacacgatttactgccaaaacagagtggagtacgagaaaagggtccgagcacaagccaagaagtttgcgccctcataagcagcgaccttgtggcatcgtcaaaaggaagggattggtttggcaagaacttgtttacaacatttttgcaaatctaaagttgctccatacaatgactagtcacctgggggggttgggcgggcgccatcttccattgccgccgcgggtgtgcggtctcgattcgctgaattgcccgtttccatacagggtctcttccttcggtcttttgtatttttgattgttatgtaaaactcgcttttattttaatattgatgtcagtatttcaactgctgtaaaattataaacttttatacttgggtaagtcccccaggggcgagttcctcgctctgggatgcaggcatgcttnntcaccgtgcagagctgcacttggcctnan

SEQ ID NO: 801 - DNA, 154 bp, Homo sapiens
ctggagacactttagaactctttccccatcctccaccatagtgcaaacttcacgcttctctgagcacctccaaggtatgcccttgaagtgaaacagaaaagggaagaaagggggctttttcttttccatttctgaccaaacagaggtctgaaat

SEQ ID NO: 802 - DNA, 446 bp, Homo sapiens
ccattaaaagttatttacaacagtgggagaaaaaaagacaagaagttgtttcacattacagacctccccccaccccaaagcctaatacttgcttaccaagtcaaaaaagagacacagttgattcacaggctggaggtttgaacttgagtaagacatttataaaaacctagacggggcagtgtcctccccagcccaggtgccactaggcacagcacaagagactaaaaacaacaggggaaggctggacactcaaggtttgggagtataagcaccccacttctggctcagggatttggggagtagggtaaacaaaacctacttggaaaagaattggggaagaaaaccaacaactgccttatgcaggggtggggacagggaaggaggtagggccagggacaggagcatttcacatcactaacctaacttgggaagctgtaagggaccat

SEQ ID NO: 803 - DNA, 573 bp, Homo sapiens
  misc_feature 514: n = A,T,C or G
ccacacagactcaccaagccacagacttgtcttccacaagcacgttcttaccttagccacgaagtgaccaagccacacgtactaaaggttgaactcaaagatatgtacagggtattaaacaaataccaaggggaacagttaacttcaatacaaggtcaaaatcagcaacaagttctacaatccagtgctgatatcagatacgagcttcaaggacaatttcttttcgaaggcttattccagtttcgtgaggctagcatgaggtgtgtgcatttgccaggggcaaatttctattctcaattaacccatgcagcaaatgctacgcatctgctgagtccgtttagaagcatttgcggtggacgatggaggggcccgactcgtcgtactcctgcttgctaatccacatctgctggaaggtggacagtgaggccaggatggagccaccgatccacaccgagtacttgcgctctgggggtgcgatgatcttgatcttcatggtgctgggcgccagggcggngatctccttctgcatcctgtcagcaatgcccggatacatggtggtgccgccagacagca

SEQ ID NO: 804 - DNA, 359 bp, Homo sapiens
ccttatttctcttgtcctttcgtacagggaggaatttgaagtagatagaaaccgacctggattactccggtctgaactcagatcacgtaggactttaatcgttgaacaaacgaacctttaatagcggctgcaccattgggatgtcctgatccaacatcgaggtcgtaaaccctattgttgatatggactctagaataggattgcgctgttatccctagggtaacttgttccgttggtcaagttattggatcaattgagtatagtagttcgctttgactggtgaagtcttagcatgtactgctcggaggttgggttctgctccgaggtcgccccaaccgaaatttttaatgcaggtttgg

SEQ ID NO: 805 - DNA, 410 bp, Homo sapiens
aaaatgttcatgtagaaaattaatgaactataggaatagctctaggagaacaaatgtgctttctgtaaaaaggcagaccagggatgtaatgtttttaatgtttcagaagcctaactttttacacagtggttacatttcacatttcactaatgttgatatttggctgatggttgagcagtttctgaaatacacatttagtgtatggaaatacaagacagctaaagggctgtttggttagcatctcatcttgcattctgatcaattggcaagaaagggagatttcaaaattatatttcttgatggtatcttttcaattaatgtatctgtaaaagtttctttgtaaatactatgtgttctggtgtgtcttaaaattccaaacaaaatgatccctgcatttcctgaagatgttt

SEQ ID NO: 806 - DNA, 522 bp, Homo sapiens
cctgctgggcttggcaacgagggactcggcctcggaggcgacccagaccacacagacactgggtcaaggagtaagcagaggataaacaactggaaggagagcaagcacaaagtcatcatggctttagcgtctgctcgtggaaaccaagataaagatgcccattttccaccaccaagcaagcagagcctgttgttttgtccaaaatcaaaactgcacatccacagagcagagatctcaaagattatgcgagaatgtcaggaagaaagtttctggaagagagctctgcctttttctcttgtaagcatgcttgtcacccagggactagtctaccaaggttatttggcagctaattctagatttggatcattgcccaaagttgcacttgctggtctcttgggatttggccttggaaaggtatcatacataggagtatgccagagtaaattccatttttttgaagatcagctccgtggggctggttttggtccacagcataacaggcactgcctccttacctgtgag

SEQ ID NO: 807 - DNA, 327 bp, Homo sapiens
ctgctgcccttagagcttgtggacaaatgtataggatcaagaattcacatcgtgatgaagagtgataaggaaattgttggtactcttctaggatttgatgactttgtcaatatggtactggaagatgtcactgagtttgaaatcacaccagaaggaagaaggattactaaattagatcagattttgctaaatggaaataatataacaatgctggttcctggaggagaaggacctgaagtgtgaatgagtttccttgacttacactagattttgttttggcttataatgacaagaaaatggaattttttttcccactttctaatgttt

SEQ ID NO: 808 - DNA, 188 bp, Homo sapiens
cgagcggccgcccggcaggtccttatccctgtaagtctattaaatgtaaataatacatactttacaacttctcttagtcggcccttggcagattaaatctttgcaaaattccatatgtgctattgaaaaatgaaataaaacctcagatgtctgaattcttatttcaaatacagttatataattatttt

SEQ ID NO: 809 - DNA, 416 bp, Homo sapiens
ctggcaggacctgaaggatcacatgcgagaagctggggatgtctgttatgctgatgtgcagaaggatggagtggggatggtcgagtatctcagaaaagaagacatggaatatgccctgcgtaaactggatgacaccaaattccgctctcatgagggtgaaacttcctacatccgagtttatcctgagagaagcaccagctatggctactcacggtctcggtctgggtcaaggggccgtgactctccataccaaagcaggggttccccacactacttctctcctttcaggccctactgagacaggtgatgggaattttttctttattttttaggttaactgagctgctttgtgctcagaatctacattccagattgaggatttagtgtcttaggaaatttttttaattttttttttt

SEQ ID NO: 810 - DNA, 539 bp, Homo sapiens
ccactctttcatggtggtggcagcagttaccagtaatgagcattagactctgggggatagaacacgggctgccctgagagcttcatgttggagctgaagttcaaggttcacttcctttgggtttgtacttgacccttcttcatgtgtctctcccgttccctctaaaacaagtgtgtttcccctcatttttgaggctgtcaatggtgtgagagccaggatcatcacggggcctgaggttttactccagaaaagcagaggagtggcaaccttggcttggggtttggcagcccaggaaaggcagggaggagagctcaaagccggtttcatgtttcacccaaggtctaattgtgggagaggacaaatccagatcccctgtttgacagaattagttcacaaatgtctcttggcaaaaacatgtgacacctaaccatgataattgacttaatccaagaaagagctctgtagggcagagcaataggaaatctctctttcgttatggaaaaaaaataatccctctacatagaaactgagtgacatgt

SEQ ID NO: 811 - DNA, 454 bp, Homo sapiens; identical to SEQ ID NO: 87

SEQ ID NO: 812 - DNA, 517 bp, Homo sapiens
  misc_feature 510: n = A,T,C or G
cgctcctgaaggagaagaggaagcgacgcgaggagctgttcatcgaacagaagaaaagaaaactccttccagacactattttggagaagttaaccacagcttcacagactaacatcaagaaatcgccaggaaaggtgaaagaagttaatttgcaaaagaaaaatgaagactgtgaaaaaggaaatgactccaagaaagttaaagtacaaaaagtacagtctgtcagccagaataaaagctacttggccgtaaggctaaaagaccaagatctgagagattcaaggcaacaagcagcacaagccttcatacataattcattatatgggccaggaaccaacaggactactgtaaataagttcctgtctcttgccaacaagaggttaccagtgaaaagagctgctgtccagtttttgaataatgcttggggaatccaaaaaaaacaaaatgccaagaggtttaaaagacggtggatggtcagaaagatgaaaactaagaagtaaatcaatgctnaatgaag

SEQ ID NO: 813 - DNA, 254 bp, Homo sapiens
ctgtttttacatctaaagcaatagactagaactgaattatcttctacatagtaaaatcacaattgtggaattacaggaattctggtgatattaaggtgaaataacaaaacacaaaaggccctattttaacagttgatgtgacagtaagttttaatagaacctgtaacttcattttggaaatgcttctccaccaaataagggctttttcccctatttaaggagccagatggattgaaagatgtggaaataggcag

SEQ ID NO: 814 - DNA, 460 bp, Homo sapiens
  misc_feature 395, 405, 437, 455: n = A,T,C or G
cctattggttatcaaatggggcacagtgtagctgcctcttaaaaagttgtgaggaatgagttagaactggatctgaagtcctcaggtaataggcatggctatgactgggtgactttaagcattgttgcttctcaacttgctttgtatcctcagcagtcaaaccaggtgctcttggctccattcagactcttgggttctgctcttgaccattttgcaaagagttctgaaccttcatgggcaaggtcaagcaccctgtgactgggggagaacctttgaacctggagtgtgggcctgggttcgccccggatccctgtccattgcttgctgtgggccttggtttctttatctgtaaaatggaggtaatgcctggattacaaggctgctataaggatganaggggacaantgagggtactttttaatgaaagcattcttgtnaccaccagggaaccatantcagg

SEQ ID NO: 815 - DNA, 295 bp, Homo sapiens
ccagtattcctggaggatataacactgacatcagcagggttttcaatggcaacaattgcacgagctgccagcagaagcttctcccaggtcctcttgagatttatgatatagatgccatcacttttccttttatagatgtactgttccatctggaagtcaagattggtgccacctaagtgggttcctgctgcaaggaacttaaggacatcctcctccttcatttgcaggacatcaagggctccggacattgtgaaaatttccctttaagttacgacgggaatccagaacaacgccg

SEQ ID NO: 816 - DNA, 96 bp, Homo sapiens
cctaggattgtgggggcaatgaatgaagcgaacagattttcgttcattttggttctcagggtttgttataattttttatttttatgggctttggtg

SEQ ID NO: 817 - DNA, 444 bp, Homo sapiens
tttttttttttttttaagaccctcatcaatagatggagacatacagaaatagtcaaaccacatctacaaaatgccagtatcaggcggcggcttcgaagccaaagtgatgtttggatgtaaagtgaaatattagttggcggatgaagcagatagtgaggaaagttgagccaataatgacgtgaagtccgtggaagcctgtggctacaaaaaatgttgagccgtagatgccgtcggaaatggtgaagggagactcgaagtactctgaggcttgtaggagggtaaaatagagacccagtaaaattgtaataagcagtgcttgaattatttggtttcggttgttttctattagactatggtgagctcaggtgattgatactcctgatgcgagtaatacggatgtgtttaggagtgggacttctaggggatttagcggggtgatgcctg

SEQ ID NO: 818 - DNA, 481 bp, Homo sapiens
aaaaagcaatcctcaaactctctagccacagcagtaattaagattaaggtctgtcagtgggctgatcccctccaggtagcctccctcactccaagagaagatgtagagaaatatggatgacacatgcttgcattgtttttgtgtcaaaacacacacacccacacacacacacaatataaggcagcccaaaggtctgtggcagaaaacactgcaaatgactcagtgatacactacatttgcaatctctcatttatacaaaaaaagaaacaagtttccagtttgttttcaacaaaaacaacaaagaaaaaagggatggacaaaaaggcatttatacaaatctagggtgaggaatacaaagaaacttgcttttaataataaaaaaagattaaagagataaataaaaaaaaactggttacagttaagaacataatttaacaacagatggccataccctttgaggaaagctccaacaacctatttt

SEQ ID NO: 819 - DNA, 317 bp, Homo sapiens
ctgggcacagtccagttctcagcagtaatgacagaaatgaaggaaggaagctcagaatgagtgcacgggggaaatgggttttgctgatgcatttccagggccggccgtactctttgttttggcacacttttcctgacaaacagccagtgttctcaacacataaatactagtccacgttaacaacaatagcatatgagaccgctctccgtaaagatgccagattggatgcaaatggactggaaataccttggagggtttcacaaaaataagacaaagggcaaaggaactttgccaaaggagatggagagcaattcttt

SEQ ID NO: 820 - DNA, 412 bp, Homo sapiens
  misc_feature 160, 272, 326, 352, 381: n = A,T,C or G
caagctttttttttttttttttttttttttttttggttaaaaaagtttaatgagctgtaaaataaatacacttccattaaatattaaataaattatttacaacttgaaaaaatactttttaccttcgtgcacctttatatacagaaatagcataaaaagngacaattgaaagtttaaaaccatcataacaaaaagggtccattgtcttatgatccactggaaagaggaccgactcatcatttatggctatgacttggcagtgactccaatgngatatcctgtaattttatcttcagttatgctatagcatgtacatttccattctnttgtcgaagtttctttcgttcctcancttctccttcatatttcctgacgtattgncttctaagctggactgtaataacagcaacag

SEQ ID NO: 821 - DNA, 226 bp, Homo sapiens
  misc_feature 185, 186, 194, 195: n = A,T,C or G
cctcggtggacatcaggcgcaggaaggtcagccaagaggaatcagaaacctgaagttagaaaggctcaacgagaacaagctatcagggctgctaaggaagcaaaaaaggctaagcaagcatctaaaaagactgcaatggctgctgctaaggcacctacaaaggcagcacctaagcaaaagattgnnaagcctgnnaaagtttcagctccccgagttggtggaaaac

SEQ ID NO: 822 - DNA, 552 bp, Homo sapiens
aaacaaattgcagagaatagagaaaaaaataggttatttacagaaaacaatatctacatatgtacttagaggtacaaatttggtgacagaaaagacttcagtatatgctggcatcttagaagcagttctcaaagagcttagttttattttcttgaattttaagaatgcctaagatccttcttcatcctcgatcttgggagccaagtagtattttaagtgtcccatatccgcaattttatactctacaacaaggggtacatctgcagacatactgagtgtcaccgttgaagagagtggagtggcttttgtaaagaagttcaggtacctcagtgcaaaagttagttgaactggttcattcatctctatggtaacagcttcctcctcttatcgacattacttgtctgtgacaatttaatgtttccatttccaagttctccacttgcagaaaatttcactccgtcttttgcacaggaaattacaacagcatctccaatatggctgagatctcggcatatacgtgcaaattcaccagaaggcatctttactacacag

SEQ ID NO: 823 - DNA, 263 bp, Homo sapiens
  misc_feature 49, 151: n = A,T,C or G
aaattgaagcgaattaaataggattttactactcaacattcattatacntgttaatctttgctgaaatatatgctaacaaatgttaagcaagggaaactgaagacttagtcatgtggattgttagcagtgatctgcattctgtaaaagagntactttcccatgatgtaggcatgaagtggtaccagtaagcgtacagcggaaatgttgactttagttaacattgggtttagcatttccagtgcagcattatcagtgggccttt

SEQ ID NO: 824 - DNA, 328 bp, Homo sapiens
aaaattagtcatcttacaacacaacagtattctagcacggtggcgaagtgacaggcggcagatacgggggaggaaggagacgttcacgggaaattccacattctactctatgtgaactgctccagaaaaatacagacatgatttcacagtaggattcccagagtaaatgatgatacataggacaactgacctcctctaagaagcccggctggggcagcagtgagcttttcatggagccacgcagactggcccggaagcaacacccaggttcaacatttaagagcactcgctataacattctttttggacgcaggtggtggaaaagttt

SEQ ID NO: 825 - DNA, 509 bp, Homo sapiens
ccacacaagtttcgaagacctactcccaaggaaaccaaggacacaatgaccttcaagacacagacagccaggaacagggcacggattgctgtgaacaacttcctcagcatctgcatgtaagctctacactcctccttctgccattggttctcttgacttcgccgcatccatctgtacccagtggtagggaagacagggtctgagcgatcacacacagtgtcgatgtataaaaagggttcagtttgccagatgaagctattcacgcagaggacaacagcagccatagctgtagcaaagcctgtcagggtgagcaggctggatatatagccagcaagtttgcccgggtgcttctcatggacaatggccccagctcctgctgcgatcaccacagaccccgcccagaaggcacagcctgaggcacgcagcacagtccagggccccaagctgagacacactccaagaacacaactcacaacccccagcaatatctgagtcacccctagagccag

SEQ ID NO: 826 - DNA, 442 bp, Homo sapiens
ctgtaacagggctgccttcactccggcatgagggtcagttaatgaagaactggtggtgggtacatgctggttttctgtccgataatctagatcttcctcagtgactggtggtggttcaggaggctcgggaggtcgttggtcaggaggcagaattcgaggccggtctggttctggcgttagctccaagatcctcatatcttgatgctggatgaggtcatcttgtcccgacaccggaatgctaggttctggaggtggcctgagttgtaatgacgcttcatgtcccgatccattttccctctcttctagtagcacatctttctgctttgactgctgagcctttattaactgagtcaacagaactgcaaatgcactctgcacagccgcctgggcagcatcagtctccactttaggctggatggtctgagaagaaggctgaattcct

SEQ ID NO: 827 - DNA, 605 bp, Homo sapiens
ccagggtttataattgggatgtaaaaagaagaaacaaggatgactctaccaagaacaaagcataatgctggcaattaaaaatgtggtttagttttccaaacatgttatcttaaatacccctttatccttacaggttgacataactttgaatgttttaacagcaagaattttaagaaaagataaacaccattttatttatttataaaaacaaaattagtttcaaatatttttgacattgtgatttttttttccacatttctcagcaaagctaatggtattttaatcattatttttgcctgtcataagaaaactcttagctgaaatggccgaaaactgtgagacatgctatggaagctgaatgccggacgctagcacagtttactttttccctttctaattggctgatgttactctcacttgatgtggttaaaccattttagaggtagagaagacagacagtttgaatatttgtaaacttgtttttctttggtatatttaggacttagtggtcctctgttgctattgtcttctataagtggagtttcatgacttactgcttaacgaataactaactactatgatattctggacattttaggaaatgg

SEQ ID NO: 828 - DNA, 475 bp, Homo sapiens
ccactagaggtctgtgtgccattgcccaggcagagtctctgcgttacaaactcctaggagggcttgctgtgcggagggcctgctatggtgtgctgcggttcatcatggagagtggggccaaaggctgcgaggttgtggtgtctgggaaactccgaggacagagggctaaatccatgaagtttgtggatggcctgatgatccacagcggagaccctgttaactactacgttgacactgctgtgcgccacgtgttgctcagacagggtgtgctgggcatcaaggtgaagatcatgctgccctgggacccaactggtaagattggccctaagaagcccctgcctgaccacgtgagcattgtggaacccaaagatgagatactgcccaccacccccatctcagaacagaagggtgggaagccagagccgcctgccatgccccagtcagtccccacagcataacagggtctccttggcag

SEQ ID NO: 829 - DNA, 361 bp, Homo sapiens
caggtcccggccgggcccatcctctccatccgggtctgcagggacatgatcacccgccgctccttgggctacgcgtatgtgaacttccagcagccggcggacgcggagcgtgctttggacaccatgaattttgatgttataaagggcaagccagtacgcatcatgtggtctcagcgtgatccatcacttcgcaaaagtggagtaggcaacatattcattaaaaatctggacaaatccattgataataaagcactgtatgatacattttctgcttttggtaacatcctttcatgtaaggtggtttgtgatgaaaatggttccaagggctatggatttgtacactttgagacgcaggaagcag

SEQ ID NO: 830 - DNA, 535 bp, Homo sapiens
aaaaaaaacctaattcattgaagtaataaccaaataattttcaatcttgattcaactgtgattcaaatcttacaccatttgcccacttctatgaattttatgtataaaattttttaagagtcagagtttttttttcttgattaattggatgtatttcacagaatttccaactgctcacgttagttttcttccttttagagttgatctctctaatgtattagatcctcatgcctttgatagtctctctggaataagtttgcagaaaaaacttcagcatgtgccaggaacacaacctcaccttgatcagaatctcctgtgggaaaagaatgtgagaaacaaggacaatcactgcatggaggtcataaggctgaagggattggtgtcaatcaaaggcaaatcacaacaagtgattgtccagggtgtccatgagctctatgatctggaggagactccagtgagctggagggatgacactgagagaacaaattgattggtcctcattggcagaaatttagataaggatatccttaaacag

SEQ ID NO: 831 - DNA, 491 bp, Homo sapiens
  misc_feature 486: n = A,T,C or G
ccatcttccacaagtactccggcagggagggtgacaagcacaccctgagcaagaaggagctgaaggagctgatccagaaggagctcaccattggctcggtgagtggcctcctccccaggaccccttttcccacccttgtcctttggaagcaggattaggggagagagaggtgccaggtgcatctgactcacatttacccacattctgaggccctggtccacatgtagaccctgagctgtagacccactctcccagcgggtaggggatgcttccagccggatatccatctctccaaatgaggaccagtaactgagaagtagctgaggagaagcaatgccaaagtgacatgggtccttggtgatgagggagcacagagccacttgcagagaggattgcctgggagggggaaggggaagaatccagggttgtcatcaccactgagtatggatttcacattctaacacattagaagctgcaggatgctgnaattg

SEQ ID NO: 832 - DNA, 311 bp, Homo sapiens
  misc_feature 121, 280, 290, 295: n = A,T,C or G
ccaccaatggtactgaacctacgagtacaccgactacggcggactaatcttcaactcctacatacttcccccattattcctagaaccaggcgacctgcgactccttgacgttgacaatctngtagtactcccgattgaagcccccattcgtataataattacatcacaagacgtcttgcactcatgggctgtccccacattaggcttaaaaacagatgcaattcccggacgtctaaaccaaaccactttcaccgctacacgaccgggggtatactacggncaatgctctnaaatntgtggagcaaaccaca

SEQ ID NO: 833 - DNA, 162 bp, Homo sapiens
ccagcagcctctgatctgtgcaaggtattaacgtgtcagggctgagtgttctgggatttctctagaggctggcaagaaccagttgttttgtcttgcgggtctgtcagggttggaaagtccaagccgtaggacccagtttcctttcttagctgatgtctttgg

SEQ ID NO: 834 - DNA, 502 bp, Homo sapiens
cctctactcaataatagtttacattactcttaacaaaatcattctacataaacagatagctccttaaaaatagtactctctcattaaatctaatttgacagaaagaagtttaagggaaaaaggagtgctttgtaagtgaaaaagtacaaatctttggcctttctcttgacattttcgtatgtcaaaaagcaaaaaaccttcatgtatttcaatctagtgattactttttgcaccataatttgttttttacaccacaaaaggaggcactttcagtatctgtaaaaggtatttaatcctaaaacatacttacctagagaataattaaaacagaattcaatacaatctagtatctattaggaaattaagagttatcacttctaaaagtcatttgaaagtcaatgatgttatctggtcaatggcaggaaatgggaactggaacaaatataagaacttatgggatttcctacacggagacaaaaaaagatattcctttatgttgttt

SEQ ID NO: 835 - DNA, 305 bp, Homo sapiens
cctaaatgtgaccaaaccaacattgtaatccagtcccttcttggaacctaaattgaactgccaagtactgcgcatgcaagagaccctttattggccttacagtgggccattcatttctataggcaaagaaagctctagacagattggaataggaaatggatatttgccttttagctacacccctttgtctgtcttcctcattttgttccttttttttttccctaaaggggagtcaagttccctgggttgttcccctcataaggtattagggacttgtgtcacatctctctggagttttctatttt

SEQ ID NO: 836 - DNA, 316 bp, Homo sapiens
atcaacctctgcggctcccactgcggcgtttccatcggggaagacgggccctcccagatggccctagaagatctggctatgtttcggtcagtccccacatcaactgtcttttacccaagtgatggcgttgctacagagaaggcagtggaactagccgccaatacaaagggtatctgcttcatccggaccagccgcccagaaaatgccatcatctataacaacaatgaggacttccaggtcggacaagccaaggtggtcctgaagagcaaggatgaccaggtgaccgttatcggggctggggtgaccctgcacgagg

SEQ ID NO: 837 - DNA, 335 bp, Homo sapiens
ctggcttcagagccggcctgacctgtaccttaatcttgtggctgtgcgcagggacttctgtgggaggccccggttcctgcatatccggaggtctgggccatagcatggctgccctgtggatgccttgtcagtgccgccagcctgaccagaggggaggtggatggcactttccagagcccaggttcttatggcatttcccagggttctgtgatttccccatgctctgcatttctaggatatttctaggacacctggattggctccatcacatcagagtggctgagggcagttgctctgtgttggtgaaattgctgtgggggtatcgggggatatgg

SEQ ID NO: 838 - DNA, 446 bp, Homo sapiens
  misc_feature 362: n = A,T,C or G
cctgacattcctgccttcttatattaataagacaaataaaacaaaatagtgttgaagtgttggggcagcgaaaatttttggggggtggtatggagagataatgggcgatgtttctcagggctgcttcaagcgggattaggggcggcgtgggagcctagagtgggagagattaagctgaagggaggtcttgtggtaaggggtgatatcatggggatgttagaagaaacatttgtcgtatagaatgattggtgatggcctggatacggttttggatgatttgagaagctaaatggaagatacaaggtccgaataaaaggaggagaaaaatgggtattaaatgtctaagaattgggaggacctangacatctgattagagagtgcctaaggagattcagcatagtcctgccagcaaagattatttacttcaagagttaagagtggcagt

SEQ ID NO: 839 - DNA, 479 bp, Homo sapiens
ctggtctttaattatgtggttccgaagcaaattccttgtatgggcatcaattggaggggttccatctttgaatacagaattcaggggagccaggagggtcaaccgctcacttccagagagatgattgccgaggccggcttgtctgaaaaggtcaatggctgtggacacatcagactctgcagccaattcaaatagtgtcttggctgagtctgggatgagtagctcatcaatgtagtggatcaccccgttggtggctaggatatctttattggagatgatcgccttcccgttgatagtgagcatgtccccgctgcagcccacctccagtgtcgtgccctccagggtctctacagacagccccgcaacgatggcttcagcacacatagctgacttcaagatgtggttgttcagcaggtctctcagggcttctgggtcgcccaggatacggttcaaagtctcactagggatcttctcgaagg

SEQ ID NO: 840 - DNA, 409 bp, Homo sapiens
ctgtccaatggcaacaggaccctcactctattcaatgtcacaagaaatgacgcaagagcctatgtatgtggaatccagaactcagtgagtgcaaaccgcagtgacccagtcaccctggatgtcctctatgggccggacacccccatcatttcccccccagactcgtcttacctttcgggagcgaacctcaacctctcctgccactcggcctctaacccatccccgcagtattcttggcgtatcaatgggataccgcagcaacacacacaagttctctttatcgccaaaatcacgccaaataataacgggacctatgcctgttttgtctctaacttggctactggccgcaataattccatagtcaagagcatcacagtctctgcatctggaacttctcctggtctctcag

SEQ ID NO: 841 - DNA, 322 bp, Homo sapiens; identical to SEQ ID NO: 755

SEQ ID NO: 842 - DNA, 402 bp, Homo sapiens
ggcattcctgttacagaccaaggagaactggagaaagaaagagaaaatcagttcgtggttgcattgtggatgcaaatctgagcgttctcaacttggttattgtaaaaaaaggagagaaggatattcctggactgactgatactacagtgcctcgccgcctgggccccaaaagagctagcagaatccgcaaacttttcaatctctctaaagaagatgatgtccgccagtatgttgtaagaaagcccttaaataaagaaggtaagaaacctaggaccaaagcacccaagattcagcgtcttgttactccacgtgtcctgcagcacaaacggcggcgtattgctctgaagaagcagcgtaccaagaaaaataaagaagaggctgcagaatatgctaaacttttgg

SEQ ID NO: 843 - DNA, 486 bp, Homo sapiens
ccacctggagacggtgattttgggcctattgaagacacctgctcagtatgacgcttctgagctaaaagcttccatgaaggggctgggaaccgacgaggactctctcattgagatcatctgctccagaaccaaccaggagctgcaggaaattaacagagtctacaaggaaatgtacaagactgatctggagaaggacattatttcggacacatctggtgacttccgcaagctgatggttgccctggcaaagggtagaagagcagaggatggctctgtcattgattatgaactgattgaccaagatgctcgggatctctatgacgctggagtgaagaggaaaggaactgatgttcccaagtggatcagcatcatgaccgagcggagcgtgccccacctccagaaagtatttgataggtacaagagttacagcccttatgacatgttggaaagcatcaggaaagaggttaaaggagacctggaaaatgc

SEQ ID NO: 844 - DNA, 541 bp, Homo sapiens
aaaaacccagtgagtattattttcaatttgttaaggttgcaaaccttcagtgaagcttgtttctcttttcttgttccttctttcaaattgaaatgacatttttgtttatagagctccaggtcaaaggatctaacaatttttaatagcaatttcctatagtgaatacttgctttttcttcctagtcttgcagcaaaaaactaagcaagctttgacatagagggacgcatgtgaatatcgtaaatttatacacaaactcccataaatactccctttcaatctaacacagaagacggggcaggacggacgcagcagttggggcgtcggaagttctgcagcatggactggaaaacactgtgctgccttcctctgagcttcttatttgaagaagtatctgaggaaatggatctccgggtctggctattttgagttttgattaatttctcatgttccctgatttgtctttgcaaatggttctggatcgcgattcccagggactctgcgtccaaggatgcaccatacacttcccaggtcattccctgc

SEQ ID NO: 845 - DNA, 337 bp, Homo sapiens
gcaccgccagccttgtgggcagcaacatgttccccaatcattaccgcgaggcggcctttgggggcggcctcctatccccggggcctgaagccacgtagccccgcgatgccagaggaggggcactgggtggggagggaggtggaggagccgtgcaatcccaaccaggatgtctagcacccccatccccttggcccttcctcatgcttctgaagtggacatattcagccttggcgagaagctccgttgcacgggtttccccttgagcccattttacagatgaggaaactgagtccggagaggaaaagggacatggctcccgtgcactagcttgttacag

SEQ ID NO: 846 - DNA, 454 bp, Homo sapiens
ccacagctaacatcattgcagcacctttactccttcggctgtgatccaatctccagctcacttctttttgccagcaccaacattggcctttgcagtccccctgactttcttcattctgttcttgcgttcctttcgttgctttcttgaggtctttttcttctcatacaggccatgtcttgcaagtctatgtttgggttcatttttctttgcataatccagggaatcataaatcatgccaaagccagttgtcttgccaccaccaaaatgagttctgaatccaaatacaaagatgacatccggtgtggtcttgtacattttggctagtttttcccgaatttctgtcttaggcactgtcgccttcccggggtgaaggacatcaatgaccatttgtttcctctgaagtagtcggttggtcatgaactttctagtgcggatagttacggtgtcgttcatg

SEQ ID NO: 847 - DNA, 369 bp, Homo sapiens
ccaacctgcctctacagcgtccacagcgaacacagggctagacaagggaggagtttctcaaacggttttaatcggttctctccgcgtcacaagccatcgggtaaggcaacggaatgtgcgtggggtcccctgtggctccgcggtcacaatactgagcctggaattgctgttagcaaaatatacatttgtgtcaccataaaaaaccgcgccgccgcccctcgggtctcacaacaggtataaaaaattataaatatttacacccttgttacacgcttttacggaaaggggatcctaggagagcccccgggacaggacgcgggggcggtagaaagagcacaaagacaggagcgcccgccttccgggtcccag

SEQ ID NO: 848 - DNA, 344 bp, Homo sapiens
ccaacttaaagccgaatcccggctccaagaaaccggagagaagaccaagaggtcggagaagaggtagaaaatgtggcagaggccataaaggagaaaggcaaagaggaacccggccccgcttgggctttgagggaggccagactccattttacatccgaatcccaaaatacgggtttaacgaaggacatagtttcagacgccagtataagcctttgagtctcaatagactgcagtatcttattgatttgggtcgtgttgatcctagtcaacctattgacttaacccagcttgtcaatgggagaggtgtgaccatccagccacttaaaagggattatggtgtccag

SEQ ID NO: 849 - DNA, 245 bp, Homo sapiens
ctgcttgggcctctctcctctggagagtcccacctgtgtagtgggcgtgggtgccctgattgggcccagttgcaggcagtagaggcagggcagggaccttgcagtccactacatgttcctcgggatttccccaggagccacagtaggagggaagtgtggtttacctggcctttgattctctccaggtgaggaagaggatggagatgaagatgaggaagctgagtcagctacgggcaagcgggcag

SEQ ID NO: 850 - DNA, 294 bp, Homo sapiens; identical to SEQ ID NO: 292

SEQ ID NO: 851 - DNA, 362 bp, Homo sapiens
ccatcctgaggatagggcagagtgcccagggtggccccagggcttctaaaaccccacctagaccaccctccatgtcaggtactgagcaaggccccagatccttctctctggaggaagagggaagcccaggggtcctgtttgtaaaacaacggtggcaacagctcctcttccagagctgtctctgcctttatcctgggagatggggaggaagccccatctctgctgttccccgcgtggaggaagcccacccagcaagctctctcctaccccaggtaaaaggtgctcctttgcctgggtttgaattccagcgctgccacttcctctctgcacctcctggcaagtttcttctattccccacgttt

SEQ ID NO: 852 - DNA, 311 bp, Homo sapiens
  misc_feature 109, 124, 241, 250: n = A,T,C or G
aaaagataatatattctaccctcatatggtcctcagaattaaagcataatgaacaggaagaaaaaggaaaagaatgcaacctgagtgctaaggcagaacatcttgccanaagtaattaatgaangtagagtatataatgaaaagtgcagaatttcatagggccaacaagataacagtctatatttttcacttacacaggcaaagtggattctgcaattaccagttgcgttaaatgcaccanataaagctnctaaaattgatactataaggcgccaccttaagtttttccaggctgcaactgtgcattattt

SEQ ID NO: 853 - DNA, 490 bp, Homo sapiens
ctgttatccaggcgctggatggggaaatgcgcaacgcagtgtgcatattttatctggttctccgagctctggacacactggaagatgacatgaccatcagtgtggaaaagaaggtcccgctgttacacaactttcactctttcctttaccaaccagactggcggttcatggagagcaaggagaaggatcgccaggtgctggaggacttcccaacgatctcccttgagtttagaaatctggctgagaaataccaaacagtgattgccgacatttgccggagaatgggcattgggatggcagagtttttggataagcatgtgacctctgaacaggagtgggacaagtactgccactatgttgctgggctggtcggaattggcctttcccgtcttttctcagcctcagagtttgaagaccccttagttggtgaagatacagaacgtgccaactctatgggcctgtttctgcagaaacaaacatcatccgtgac

SEQ ID NO: 854 - DNA, 366 bp, Homo sapiens
aaaaactgccacttggagataaaaatcaagggcacaatgtactcagagagtattgagctatctggtatcccaaatgatgtgaatactttcagaaaccaatggcaaattgaacccacgtttcccagctatggagatattaatacattgattcaaatcccattactcaatccacatagccctgaggtcatcctgcaaagtgcgtatcaaaaaatacgaagttagggtgacaaagtttgacagtgatgttatacaagtcaaacttggaaggtcatagtaagcatacctatgctgagagaaaagcatcaaatcctttgtgtacacatttagttttattgtaacaaagcaacttgtacacttttaacgttt

SEQ ID NO: 855 - DNA, 434 bp, Homo sapiens
ccaacatggtgaaaccctgtctcttctagaagcacaaaaatgagctgggtgttctggtgggcacctgtaatcccagctacttgggaggcttaggcaggagaatcactggaacccaggaggcggaggttccagtgagccaagatcgcaccactacactccagcctaggccacaaagcaagactgtttctcaacaacaacaacaaaaaaaaaaaaaaaaaagagactcagagagccagggaccagggaaggatatgaggaagtgttctgaggacagagaaatgggagaatggggaggagaaggagcggcacatggagctcagcagaggagacagacagaaggaaagatggcttggagaagccggcagtctgcgaggctgaggaggatggagagtggtttggggttttgggtcgggctctagtgtgatcaactgcag

SEQ ID NO: 856 - DNA, 283 bp, Homo sapiens
ctgctgctattaagttgcaagctctacagctagctacatgactgatggatcagtttgagatttgttcccttgtcaaaagtttaactctgatagaaggttggcctcacattctgatgtttggacatcccttagctaggatatgtctggtcgaacagacctttgtggcaagccagatgtcctatcacctcgctagcggtaagagggcctctttgagctctgtccacctagtcaggttggagacaccaggggatctaccaccaaaagctcccttctagtagtacag

SEQ ID NO: 857 - DNA, 149 bp, Homo sapiens
ccatattgacagaccaatctatgggactaggggaattggcatcaagtcgacacccttgaacctgctatggccttcagcagtcaccatcatccagaccccccgggcctcagtttcctcaatcatagaagaagaccaatagacaagatcag

SEQ ID NO: 858 - DNA, 301 bp, Homo sapiens
  misc_feature 246, 268, 297: n = A,T,C or G
ctggaggatggccgcactctctcagactacaacatccagaaagagtccaccctgcacctggtgttgcgcctgcgaggtggcattattgagccttctctccgccagcttgcccagaaatacaactgcgacaagatgatctgccgcaagtgctatgctcgccttcaccctcgtgctgtcaactgccgcaagaagaagtgtggtcacaccaacaacctgcgtcccaagaagaaggtcaaataaggttgntctttccttgaagggcagcctnctgcccaggccccgtggccctggagcctnaata

SEQ ID NO: 859 - DNA, 485 bp, Homo sapiens
ctcgtgagacaggatgcccaggacctgtatgaggctggagagaagaaatgggggacagatgaggtgaaatttctaactgttctctgttcccggaaccgaaatcacctgttgcatgtgtttgatgaatacaaaaggatatcacagaaggatattgaacagagtattaaatctgaaacatctggtagctttgaagatgctctgctggctatagtaaagtgcatgaggaacaaatctgcatattttgctgaaaagctctataaatcgatgaagggcttgggcaccgatgataacaccctcatcagagtgatggtttctcgagcagaaattgacatgttggatatccgggcacacttcaagagactctatggaaagtctctgtactcgttcatcaagggtgacacatctggagactacaggaaagtactgcttgttctctgtggaggagatgattaaaataaaaatcccagaaggacaggaggattctc

SEQ ID NO: 860 - DNA, 501 bp, Homo sapiens
ctgagccactgcccctggctgacgctgcctctttgaagtgcttgtcttccctgctactctggggtctgctgcccgctggctgctcccaggtgttctttgccagatccccaccaaacttcatgcctccaaggcttgagggtgcccgggctcagtatttccaggttactgatccagcaaaattataagaaacattaaaattctctgaaaatttcagttttttcccttttttcaaagagaaaaacaattataggagacttctcctggcttcacagtttctggatgctgtgtttttgttaactgtaacactttgaaatagcatttgctaaaaaccttttttctttctctcttttttggtgatgtggcagagagaaagacattgagatgttccttgagtccagccgcagcaaatttataggttacactctaggcagtgacacgaacacagtggtggggctgcccaggccaatccacgaaagcatcaagactctgaaacaggtgagt

SEQ ID NO: 861 - DNA, 365 bp, Homo sapiens
ctgaggaagaaatgaaaaaagaccctgtcccccatggcccgcccactggcctcctgtgaactctgtcctgttgccaaccccagatgaagtcagccaaaaagtgctttccacatcctctctctggggctgcccagcctgaccgcaggggatccactggcagagccaaggtggatgctggtgcctgaagctggaagccagcaggacatgagacccctcctgtagcaggaagtggttctagaactcccagcagaacagaacggaaaaggagctgattggggatagaatgagttctgctaaacagccagatgctctgagagaggtgacactggactgtctcggaggtgtgtgcagatggctacaggtgg

SEQ ID NO: 862 - DNA, 617 bp, Homo sapiens
ctgcaaagtaccacacatagcagaaagacagaaatttatactggggggttggaagatatggctactgagtctgtaattccatttggaggttcaaaaaaccatttttacattgctattatttgtacagaccaagggacctaaattttgaaacagctagacagtgatataaacaaacatttatctctgggggtagaaaattaattataatacaagaatgaaaatgggcaaacagtatggaaggcacccacacctcctagcaccctttggttttctgatggagttctcacttcacacatcagtgcattggattgcagaaaatattgatattttatttcatcaaaagtgccatttggtatgccactattgaaagcttatcgctgtctttttctccttcagcaagtagaggtcaatgaagcagggtgtgttagttacgcaaattcctataaggcactttacggttttcatattggacagtgaggtacacaggatatatttctagggttcgttgctgttaacaaaaagaagaagaagtagcaccatgttgtgacattagctgagtcaggcttcattatgttcttctcatacagacttggcagcggctgacgtgcgtgcgcagc

SEQ ID NO: 863 - DNA, 520 bp, Homo sapiens
ctggggccactgtcggcatcatgattggagtgctggttggggttgctctgatatagcagccctggtgtagtttcttcatttcaggaagactgacagttgttttgcttcttccttaaagcatttgcaacagctacagtctaaaattgcttctttaccaaggatatttacagaaaagactctgaccagagatcgagaccatcctagccaacatcgtgaaaccccatctctactaaaaatacaaaaatgagctgggcttggtggcgcacacctgtagtcccagttactcgggaggctgaggcaggagaatcgcttgaacccgggaggtggagattgcagtgagcccagatcgcaccactgcactccagtctggcaacagagcaagactccatctcaaaaagaaaagaaaagaagactctgacctgtactcttggatacaagtttctgataccactgcactgtctgagaatttccaaaactttaatgaactaactgacagcttcatgaaactgtccaccaagat

SEQ ID NO: 864 - DNA, 449 bp, Homo sapiens
ccattaaaagttatttacaacagtgggagaaaaaaagacaagaagttgtttcacattacagacctccccccaccccaaagcctaatacttgcttaccaagtcaaaaaagagacgcagttgattcacaggctggaggtttgaacttgagtaagacatttataaaaacctagacggggcagtgtcctccccagcccaggtgccactaggcacagcacaagagactaaaaacaacaggggaaggctggacactcaaggtttgggagtataagcaccccacttctggctcagggatttggggagtagggtaaacaaaacctacttggaaaagaattggggaagaaaaccaacaactgccttatgcaggggtggggacagggaaggaggtagggccagggacaggagcatttcacatcactaacctaacttgggaagctgtaagggaccatctt

SEQ ID NO: 865 - DNA, 426 bp, Homo sapiens
aaatcaattcaaatatctcttaaatgcctttgtaaaatcagctctatactaggtgtgaaggagataagaaatattacaaaaatgtctttgttccaaatttcctcatagtatagttgggaaaggcaaaagaagcagacatgaaaaatttaagtatccacataagatgatccatgtatcataaagagtgatgtaggcatttaagatttacaggagaagaaggctctttttgttgatattttctgcttggaccaagaatatttatctggtaatactgttaattggaaatacttttgctgctgcaattgtatacattatgctaatctgcattttcttatccaaaacaagagcactcattaaggactccctgacgtgcagttctggtcagtaacaatacccttaacccttccctcaccctcatcatggcag

SEQ ID NO: 866 - DNA, 458 bp, Homo sapiens
ccaatttcgggagatccatgctggtgtgctgtctctcggctagtgcttccttcttctcgaggatggcatagccagcatctgcagtggctgactcccgcctctcgtcatctcgcagggagctgataggctggaagctatttttgaagttttctttttgtttgttgagactgcgggcccagcgttccatgtccttggcaatctgttgagctgtcttggtcttgtgcttctccttcttctctttgccctccttcgagggtgcccctgtctccttatgtccgtcggccgactgctccagggcgggaacataggtccgcctctccccatcccagtacaggtactgctggctctgagcattgtagtaatactgggagttggggtcatagtagaggccggtctgggggtcatagtagtagccggaggtctcatcgtactggtaggtagagacgtcgggaacaggg

SEQ ID NO: 867 - DNA, 392 bp, Homo sapiens
ctggcttcacagatttcttactgcccatgttggagctgatccctgagaagagagccactgccgccgagtgtctccggcacccttggcttaactcctaagcccctgcccagcaccacagcagagatcacacactgaccctccgcccttccccttcaagcattttcctcttcccttttcagggtgaagctcttccttcaagagtttctagatcttgttttttttttaatccaacatgttcatttgggtttgcttacttgaccctgtggagatccccacagccattgggcatcctaggtgaatttggccttggttgggctctgccaaagactaatggactaaaatgtgaaacagcctcttgccctgtacctttccttcccattaggacatccttt

SEQ ID NO: 868 - DNA, 203 bp, Homo sapiens
aaagtagttttctttaggaactgtcagcatgttgttgttgaagtgtggagttgtaactctgcgtggactatggacagtcaacaatatgtacttaaaagttgcactattgcaaaacgggtgtattatccaggtactcgtacactatttttttgtactgctggtcctgtaccagaaacattttcttttattgttacttgcttttt

SEQ ID NO: 869 - DNA, 240 bp, Homo sapiens
cacctttcatgatcacgccctcataatcattttccttatctgcttcctagtcctgtatgcccttttcctaacactcacaacaaaactaactaatactaacatctcagacgctcaggaaatagaaaccgtctgaactatcctgcccgccatcatcctagtcctcatcgccctcccatccctacgcatcctttacataacagacgaggtcaacgatccctcccttaccatcaaatcaattgg

SEQ ID NO: 870 - DNA, 479 bp, Homo sapiens
aaagagcctgagatttatatttaactcgaacaacagtttgcctctgttgcccctgtgttcatgttttcctaagccagagtttcccacgcctcctgttcctggcagcccaagtgccttcgctgggctactcccacctggcccttgcttttcattccttagggcagtcacttagcaccttccaaagtgcctgcacatgtttcttatttcatttcttaaacattcatattaccactatttagattgaaggaacagaattggtttgggcttgaagagaatacaaagagatctgtcttcaattatctgatagtagtaaagtttcacgggagaaagaaagatttcggttccacataaggaaaaacttggaaagttttgaatggaaagttcatagagagattcagtaaccacctgtcaggaattttgtaaagacgtctacggccatatcaccctgaacgcgcctgatctcatctgatctcggaagc

SEQ ID NO: 871 - DNA, 555 bp, Homo sapiens
  misc_feature 521: n = A,T,C or G
aaagttgctttgctggaagtttttataaggaatctcaaattaaacttttagaagtttaattgacactaggaagccaaaccaaggctgacttcagactttgtttgtagtacctgtgggtttattacctatgggtttatatcctcaaatacgacattctagtcaaagtcttggtaatataaccaatgttttcaaatgtattctgttatacaaagagcagatttttattgaacttgtgcaataactatattaccatacaatataaatattcatgaatagtttcccaagtctggagcgaccacatagggagaaaatgtaaatgtctcaatttttgttcacaaaagtatattttatcaaattgctgtaagctgtggatagcttaaaagaaaaaaagtttcctgaaatctgggaaacaagacatttaaagaatcagcaaaatttcaaataaaaaattatgaaaatattatcctcattagttcatttagtcccatgaaattaattattttctctgcttgatcttggtngacagtttcatgaagctgtcagttagttcattaa

SEQ ID NO: 872 - DNA, 94 bp, Homo sapiens
ccttagagccacagcggcggcacaacgtgtgcgtcttattgcgacgctttccaaacgatgacgttcccttcgtcatctcgcttctgcggccgag

SEQ ID NO: 873 - DNA, 294 bp, Homo sapiens; identical to SEQ ID NO: 292

SEQ ID NO: 874 - DNA, 298 bp, Homo sapiens
  misc_feature 284, 296: n = A,T,C or G
cctataattcctaccttgactgtgtgcatcatttgtaagctagcagatctatgtggtgaaaatgcacaggagcttggtagactgcgggggaaagagagagctcctttcgccatgttttaccagtctactgttataacctcttaggttgtatcctttaatttccagccttttaggttagtttctgtaacagaacaagtgagtctgggatgaagtcctcaaagtacttcaaatggtaattgttttgtttttgtaatagcttaacaaataaacctaggttttctatngaaaaaaaaaangc

SEQ ID NO: 875 - DNA, 276 bp, Homo sapiens
attatcctctgtttctctgctgcaccgacctcgacgtcttgcctgtgtcccacttgttcgcggcctataggctactgcagcactggggtgtcagttgttggtccgacccagaacgcttcagttgtgctctgcaaggatatataataactgattggtgtgcccgtttaataaaagaatatggaaactgaacagccagaagaaaccttccctaacactgaaaccaatggtgaatttggtaaacgccctgcagaagatatggaagaggaacaagcattt

SEQ ID NO: 876 - DNA, 452 bp, Homo sapiens
ttgaagatggtcccttacagcttcccaagttaggttagtgatgtgaaatgctcctgtccctggccctacctccttccctgtccccacccctgcataaggcagttgttggttttcttccccaattcttttccaagtaggttttgtttaccctactccccaaatccctgagccagaagtggggtgcttatactcccaaaccttgagtctccagccttcccctgttgcttttagtctcttgtgctgtgcctagtggcacctgggctggggaggacactgccccgtctaggtttttataaatgtcttactcaagttcaaacctccagcctgtgaatcaactgtgtctcttttttgacttggtaagcaagtattaggctttggggtgggggaggtctgtaatgtgaaacaacttcttgtcttttttctctcccactgttgtaaataacttttaatgg

SEQ ID NO: 877 - DNA, 289 bp, Homo sapiens
  misc_feature 185, 262: n = A,T,C or G
aaaaacaacaccaaagcaaacccatagcccctgtcaagccagtcctcagggagagtgagctggaaggctccccctgcacttctctgagcagagatcttgggcccctcccactggaccccagcctgagcagagggcaaggctctgcctgctggtaccctagggggtgggggagaagcgatcagctncaaaccatgcaagaaaaacaagccaaacccataaagcaaaagaaaaaatcaacagaggataaattaaaaaaaacacnaaaggtgaatgacaccgataacggtgg

SEQ ID NO: 878 - DNA, 411 bp, Homo sapiens
ctgcatatggcctgggagtcatggcacagtacggtggagataattatcgccctttttgtacagaagcacttcccctgctggtaagagttattcagtctgcggattctaagatcaaagaaaatgtcaatgctacagagaactgcatctcagcagtagggaaaatcatgaagttcaagcctgactgtgtaaacgttgaagaggtccttccacactggttgtcttggcttccactacatgaagataaagaagaagctgttcagactttcaattatctgtgtgacctgattgaaagtaatcatccaattgttcttggcccaaacaataccaatctgcccaaaatatttagtataattgcggaaggagaaatgcacgaggcaattaaacatgaagatccttgtgccaaacgtctgg

SEQ ID NO: 879 - DNA, 423 bp, Homo sapiens
aaacagttggaacaccggtggcactgttaactgctttctgggcagcctctttagcttggtgggcttgtagtacagctacagcttcatcaaccttagaacggagtgactctggagactcgagcatatgaagaagttctgaattatcaatctccaacaacatgccagtgattttaccagcaagagtagggtgcatggcttgaataagaggaaacagccgttcacccaacatttgcttttgctcttgaggaggggcagatgccaacatggaagcagtcaaaggttcctgaccttgtacatgaacagcaggctgttgcattgtaacttgtggctgtgcattaagatgttgctgaggattgcgaactcctgcagcatatttatactgtggaacggtgcggacagcaggagtagctgcagcggctgcag

SEQ ID NO: 880 - DNA, 437 bp, Homo sapiens
ctgggggacgtggttcacggcgtggaaagcctagtggagcttctgggctggacagaagagatgcgggaccttgtgcagcgggaaactgggaagcttgatggaccagacaaataggatgatggctgcccccacacaataaatggtaacataggagacatccacatcccaattctgacaagacctcatgcctgaagacagcttgggcaggtgaaaccagaatatgtgaactgagtggacacccgaggctgccactggaatgtcttctcaggccatgagctgcagtgactggtagggctgtgtttacagtcagggccaccccgtcacatatacaaaggagctgcctgcctgtttgctgtgttgaactcttcactctgctgaagctcctaatggaaaaagctttcttctgactgtgaccctcttgaactgaatcagaccaa

SEQ ID NO: 881 - DNA, 411 bp, Homo sapiens
  misc_feature 160, 332, 380: n = A,T,C or G
caagctttttttttttttttttttttttttttttggttaaaaaagtttaatgagctgtaaaataaatacacttccattaaatattaaataaattatttacaacttgaaaaaatactttttaccttcgtgcacctttatatacagaaatagcataaaaagngacaattgaaagtttaaaaccatcataacaaaaagggtccattgtcttatgatccactggaaagaggaccgactcatcatttatggctatgacttggcagtgactccaatgtgatatcctgtaattttatcttcagttatgctatagcatgtacatttccattctcttgtcnaagtttctttcgttcctcacttctccttcatatttcctgacgtattgncttctaagctggactgtaataacagcaacag

SEQ ID NO: 882 - DNA, 358 bp, Homo sapiens
ccactagaggtctgtgtgccattgcccaggcagagtctctgcgttacaaactcctaggagggcttgctgtgcggagggcctgctatggtgtgctgcggttcatcatggagagtggggccaaaggctgcgaggttgtggtgtctgggaaactccgaggacagagggctaaatccatgaagtttgtggatggcctgatgatccacagcggagaccctgttaactactacgttgacactgctgtgcgccacgtgttgctcagacagggtgtgctgggcatcaaggtgaagatcatgctgccctgggacccaactggtaagattggccctaagaagcccctgcctgaccacgcgagcattgt

SEQ ID NO: 883 - DNA, 297 bp, Homo sapiens
ctgactatccaacatgattcctatggaaacagaaggggcagagtcctggtttgctggcttattgagggcttggcagagaagctaaagctccaaagtgactacagattctctgcaaccggctttgacccatggaaacaggagccagattctcactctagagatagtgagggggccaaacctactcataccacatgcattagtcctggtcatcctccaggaccatgcgtatgatgggcaactcataccaggcaggggaagggagctgattagggaagaagggaccatttttcatctttt

SEQ ID NO: 884 - DNA, 367 bp, Homo sapiens
aatttggttaaaatatctcggcctgataagggaactgggcaggtggagataactaaaaaagagtgcataaaagagtgttgttcaagttggcaccagagttggggagttttaagaggtttagaagcctggctgtcaatacccacaacagttatggaggcaagggaaacaggcccttgaaaagaaggtaatgtggagtgggtagcctccatattgattaagaaggggacagacttaccctccactgtgagagttacctaaagctcggtgtccatggtggtttacagggcttctgaggcgatcaggcagcgtcagtcttcagccactaagccaagaaggagtcagtcagagagccttgggccagtgttcc

SEQ ID NO: 885 - DNA, 194 bp, Homo sapiens
gcaggtaaaaatcctgtgtaaaggagcaccttaaacataccagtgccccccaggaggctccaccctcaactcaacccaagcaacagggacagatgaaaaacaaaatccaatcagggcgataaatggcggggggcaggacgtggtggtctccaggctggcttcgtgcgttcttgcttttgtcactgcccccctgt

SEQ ID NO: 886 - DNA, 253 bp, Homo sapiens
  misc_feature 143: n = A,T,C or G
aaaataaggagttgtgggggaagggtgtcgtgcactcctagagaaaggtacacagttgcccggttgggaatgtgcttggcgctgaccctgcgggcatctgactggtcttccagctcaggaaaaagaatttgaaagaggcttancgtgaaggggaatcaaagaggaggttgtgatttggtcgaaggtgcctggtttagtgctgtaattgtcttattattttttttatatatatatttcttggagtaaacatttt

SEQ ID NO: 887 - DNA, 406 bp, Homo sapiens
ctgaatcgcgcagaatttgaagatcaagatgatgaagccagagttcagtatgagggttttcgacctgggatgtacgtccgcattgagattgaaaatgttccctgtgaatttgtgcagaactttgacccccattaccccattatcctgggtggcttgggcaacagtgagggaaatgttggctacgtgcagatgcgtctgaagaaacatcgctggtataagaaaatcctcaagtcccgagatccaatcatattttctgtagggtggaggaggtttcagaccatcccactgtattatatcgaagaccacaatggaagacaaaggcttctaaagtataccccacagcacatgcattgcggagcagccttttggggccctatcactccacagggaactggtttcttggcaa

SEQ ID NO: 888 - DNA, 172 bp, Homo sapiens
aaatacagggttctaaaaagaaggaaaaaacccagaacatcacatacttttaattatttgtaaaagcattattctagttttctaagtctttatacttaaaaatgaaagcagtgtggaaaagaatccacataagcaggtatcatcagagtttgcgcagattagccaaaacagg

SEQ ID NO: 889 - DNA, 479 bp, Homo sapiens
ctgaggaagctcttcattggagggttgagctttgaaacaactgatgagagcctgaggagccattttgagcaatggggaacgctcacggactgtgtggtaatgagagatccaaacaccaagcgctccaggggctttgggtttgtcacgtatgccactgtggaggaggtggatgcagctatgaatgcaaggccacacaaggtggatggaagagttgtggaaccaaagagagctgtctccagagaagattctcaaagaccaggtgcccacttaactgtgaaaaagatatttgttggtggcattaaagaagacactgaagaacatcacctaagagattattttgaacagtatggaaaaattgaagtgattgaaatcatgactgaccgaggcagtggcaagaaaaggggctttgcctttgtaacctttgacgaccatgactccgtggataagactgtcattcagaaataccatactgtgaatgg

SEQ ID NO: 890 - DNA, 571 bp, Homo sapiens
  misc_feature 29, 40, 139, 211, 351, 379, 559: n = A,T,C or G
gctttttttttttttttttttttttttgnaactaaaaaanaactttatttattgagggcaaggggatgcaaacaatacaaaaatcaaaagcttatctggtatttaacttttctttctctgcttgtcaaatgagagttanattttatttttacatttgctaagtgtcctgatctgctcatgaaatccttctatgggggaagctgtggggcanattccttaagcgaccctttgggacaactcttatcagggaggagcgaactgctcatttctgcctacttctttcccttctgcttcatgtgtactacaaaatagtcattgcatgcaatggtgaggcccgcaattagggaaaanaagctctggaagcccactttgccatctntacactggtccaggtccttcattattttgtccacagccagagggtctttttgattttccaaaaatccagggaactccttttccatgagtactctcaggtcctcctttgttaagtagcctttatccccagcgaatttgtgaaatgtaaacatcatggtttccatggcgtgttccatttganatggcattttgg

SEQ ID NO: 891 - DNA, 170 bp, Homo sapiens
aaaaagtgtttcagatatttctctaattatgtacaacctaaaatgttggtgttttgtatggatcacaagtgcagcattccttaattccttctgctatatgtcacacagttgttatttggagaaccaagtatgtattgcatgaaaacattatgacttttttctcttagttt

SEQ ID NO: 892 - DNA, 563 bp, Homo sapiens
aaatgccatgatccaggatggattttagatcttgttgaaagcagccacatccatggactgcacatagtcctcaaaagcagtgatctgctcctccagcatatctgttccaactttatcatcttcaactacacactgtatttgaagtttcttaattccgtatcccactggaactagtttagatgagccccagactaagccgtctgcttgaatgcttctgacgcactcctctaatttcgccatatctgtctcatcatcccaaggtttcacatctagtaagatggaagacttggcaacaagtgcaggttttttggctttctttgattcatattgtgcaagacgttcttcccttagcctctttgcttcttcactttcctcctcatcatcagatccaaagaggtcaatgtcatcatcatctttactatctgtagctccacttcctgtagtgtcttccacatcggcaggaccatatttgcccaaagctttcttcactcctggcaggctggccttttccttttcgtaagacttgatgtgattataccaacgtagggcatgacacaagtcgg

SEQ ID NO: 893 - DNA, 159 bp, Homo sapiens
gcaaaaccccactctgcatcaactgaacgcaaatcagccactttaattaagctaagcccttactagaccaatgggacttaaacccacaaacacttagttaacagctaagcaccctaatcaactggcttcaatctacttctcccgccgccgggaaaaaag

SEQ ID NO: 894 - DNA, 346 bp, Homo sapiens
  misc_feature 290: n = A,T,C or G
aaatgtgtggaacaatgctacatctacacttggttggcttaatcaacctcttcaatggtgggccctgaggaagcaccaccagagggaggagctccaccaccaggaaatcccccaggcattcctcctggcatgcctcctgcactctggtacagcttggtgatgatggggttgcaaactttctccagctctttctgttgatgttcaaattcttccttctcagcagtctgattcttatcaagccagttgataatttcattacacttgtccagaatcttctgtttgtcctcatngttaatcttgccttgaagtttctcatcttcaacagttgctttcatgttgaaggcat

SEQ ID NO: 895 - DNA, 342 bp, Homo sapiens
ctgaacatctgcagcaaggtcaaggccgaggtgcagaatctcggcggggagcttgttgtctctggggtggacagcgccatgtccctgatccaggcagccaagaacttgatgaatgctgtggtgcagacagtgaaggcatcctacgtcgcctctaccaaataccaaaagtcacagggtatggcttccctcaaccttcctgctgtgtcatggaagatgaaggcaccagagaaaaagccattggtgaagagagagaaacaggatgagacacagaccaagattaaacgggcatctcagaagaagcacgtgaacccggtgcaggccctcagcgagttcaaagctatg

SEQ ID NO: 896 - DNA, 552 bp, Homo sapiens
  misc_feature 438, 441: n = A,T,C or G
atgctaaactgtgaaaaatcagatgaattgataaaagagttccctgcaaccaattgaaaagtgttctgtgcgtctgttttgtgtctggtgcagaatatgacaatctaccaactgtccctttgtttgaagttggtttagctttggaaagttactgtaaatgccttgcttgtatgatcgtccctggtcacccgactttggaatttgcaccatcatgtttcagtgaagatgctgtaaataggttcagattttactgtctatggatttggggtgttacagtagccttattcacctttttaataaaaatacacatgaaaacaagaaagaaatggcttttcttacccagattgtgtacatagagcaatgttggttttttataaagtctaagcaagatgttttgtataaaatctgaattttgcaatgtatttagctacagcttgnttnaacggcagtgtcattcccctttgcactgtaatgaggaaaaaatggtataaaaggttgccaaattgctgcatatttgtgccgtaattatgtaccatgaatatttatttacct

SEQ ID NO: 897 - DNA, 162 bp, Homo sapiens
ccagcagcctctgatctgtgcagggtattaacgtgtcagggctgagtgttctgggatttctctagaggctggcaagaaccagttgttttgtcttgcgggtctgtcagggttggaaagtccaagccgtaggacccagtttcctttcttagctgatgtctttgg

SEQ ID NO: 898 - DNA, 343 bp, Homo sapiens
ccacctgcttgagccagggtggcctcctggaagacctggacaacctcatcctggaggacctgaaggaggaggaggaggaagaggaggaggtggaggacgaggagggcgggcccagggagtgacccctgccaggtgcagatacaaaccagacacggtctgtggctactttgtgttattataagatatgagctcaaaccgagatatgaatgaccttggggagccatctgaggccaagatattgacgggggggattcctgggtcccattttcagcgcccagggtcacagatccacagtgggaagttctgtgggacacattggcactgagccacaaagaaggtgtgg

SEQ ID NO: 899 - DNA, 196 bp, Homo sapiens
cctacagacttatttcttcttggacacacccacggtgcggccacggcggccagtggtcttggtgtgctggcctcggacacgaaggccccagaagtgacgcagccctctatgggcccgaatcttcttcagtcgctccaggtcttcacggagcttgttgtccagaccattggctaggacctggctgtattttccatcc

SEQ ID NO: 900 - DNA, 403 bp, Homo sapiens
ccaccctgaaaatcaggaactccaacttctacacggtggcagtgaccggcctgtccagccagattcagtacatgaacacagtggtcagtacatatgtgactactaacgtctcccttattccacctcggagtgagcaactggtgaattttaccgggaaggccgagatgggaggaccgttttcctatgtgtacttcttctgcacggtacctgagatcctggtgcacaacatagtgatcttcatgcgaacttcagtgaagatttcatacattggcatcatgacccagagctccttggagacacatcactatgtggattgtggaggaaattccacagctatttaacaactgctattggttcttccacacagcgcctgtagaagagagcacagcatatgttcccaagg

SEQ ID NO: 901 - DNA, 461 bp, Homo sapiens
aaattataatttttattcctcagtcaccactgctaatccttcaatttatttcaaagtaacttctggtttttattacatttggaagataaagcaacttatcacatgtaggttacaacttaaaattcgtgtatgagccattgcttatattttctaaatctgacatgacccagggggtttctactgctcctaccaccacccaggacatgcgatgaagattgtgcacgttaccgtgagggcagaagcaggttagtagctataggagctgtcacatggatttactataatgcacttgaaattgtgtatgtgaccttatcaggcatttaaggaccataatctctccttgacctaagaaatcagcttgaagtaattcacttagatttcaaattttaatgtggataccccaaggctgcaaatctgttattcagtacctgctacacttttggggttgcctcttttatgca

SEQ ID NO: 902 - DNA, 256 bp, Homo sapiens
ggccctcccccaactggtgaagaggatacagcagaaaaagatgagttgtagacactgatctgctagtgctgtaatattgtaaatactggactcaggaacttttgttaggaaaaaattgaaagaacttaagtctcgaatgtaattggaatcttcacctcagagtggagttgaaactgctatagcctaagcggctgtttactgcttttcattagcagttgctcacatgtctttgggtgggggggagaagaagaattgg

SEQ ID NO: 903 - DNA, 362 bp, Homo sapiens
ggacagggaggaatcctggctcagcgggagtttgacaggcgattctcccctcattttctggactgggcagcctttggggtcatgacccttccctccatcggcatccccctgctattgtggtactccagcaagaggaaatatgacactcccaaaacgaagaagaactgattggggcttccacagccctcctctcccaagaaatccaggctcctctcccaagaaatccaggtgctttccagactccaaagggtatcttaaatgcaatctcttctctcttagcccttagccactttctcctggatcctgccctgctctcagccatagtgaaggaccagccctaggagtctgcgagagcctccttg

SEQ ID NO: 904 - DNA, 419 bp, Homo sapiens
aaacttcaaaagactggctgccagggaccacagtgaaaaattagacctggagccaatgaaaaacactagcttggaaggaatgggtttttccaaaaatgcaaaattagcatttacagatgcttaggatactatgatttgacaggcttacagtgataaaacaacaaagatgaacagttacaatatttatacgtgtagtgtgtaaagaacacaggttttttaattggcagcaagaaattctatgacagcttctgagacaagtaatcctatgccctatatccaccccatgccaatgacgaccagtcaaaatggtaacacagagtaaaaagtgatctactgtatgtgagtcagaaagtacttgaaaagtgacaaaactgtatgttattaaatgacaaaacatatttagaggctttatttaaaaa

SEQ ID NO: 905 - DNA, 238 bp, Homo sapiens
ccaaaagtttagcatattctgcagcctcttctttatttttcttggtacgctgcttcttcagagcaatacgccgccgtttgtgctgcaggacacgtggagtaacaagacgctgaatcttgggtgctttggtcctaggtttcttaccttctttatttaagggctttcttacaacatactggcggacatcatcttctttagagagattgaaaagtttgcggattctgctagctcttttggg

SEQ ID NO: 906 - DNA, 411 bp, Homo sapiens
ctggtcctctccccacatgtcacactctcctcagcctctcccccaaccctgctctccctcctcccctgccctagcccagggacagagtctaggaggagcctggggcagagctggaggcgggaagagagcactggacagacagctatggtttggattggggaagagattaggaagtaggttcttaaagacccttttttagtaccagatatccagccatattcccagctccattattcaaatcatttcccatagcccagctcctctctgttctccccctactaccaattctttggctcttacacaatttttatccctcaaatattcatccctggcccaaccagtcccctgagcctccctctggtggagactcctccacccatgagctccccagagcatccaagacagagtgca

SEQ ID NO: 907 - DNA, 595 bp, Homo sapiens
  misc_feature 558, 580: n = A,T,C or G
aaaaactgcattactgaatttaacaaaagtcagacactagaatcatatatttgctgcataaaagttgatttgatacctggtggtgattgaatttagtctcaaagactcataaataaaaatctgacttaagacgtagtcataccagtataccaattctcccatcactttgactttcggcagagagattagagcaaaaaatattcaggagaacagtggagttacattgtattatgtatgtttaatataatatcaattttaaggttaaggttaaggaaatcttaattttaaggttaaaccttgagtactagttatagaacttaatattcctggttaaagagtaagttaactgggttattatgtggccttggttgaagaccataaattatgcatttatgcatttgtggttgctttggttctcaatacattgaatatgcatagccccttctagaaatatatatagtgagaaatctgtaaaatgggggagttagactaagtgtgaactaaaatcttcccactgtgtacaggacacatcagctgagagcaaatcagtttttatgnttactcagcaccatcctcactnaaaactattattttt

SEQ ID NO: 908 - DNA, 601 bp, Homo sapiens
  misc_feature 4: n = A,T,C or G
cgantactatagggcgaattgggccctctagatgcatgctcgagcggccgcccgggcaggtaaaaagtatcttgatggttcttttctatttataatttcagactttcataaagtgtaccaagaatttcataaatttgttttcagtgaactgctttttgctatggtaggtcattaaacacagcacttactcttaaaaatgaaaatttctgatcatctaggatattgacacatttcaatttgcagtgtctttttgactggatatattaacgttcctctgaatggcattgatagatggttcagaagagaaactcaatgaaataaagagaatatttattcatggcgattaattaaattatttgcctaacttaagaaaactactgtgcgtaactctcagtttgtgcttaactccatttgacatgaggtgacagaagagagtctgagtctacctgtggaatatgttggtttattttcagtgcttgaagatacattcacaaatacttggtttgggaagacaccgtttaattttaagttaacttgcatgttgtaaatgcgttttatgtttccagggagcctcgaatcttcagtctctcagagaccacag

SEQ ID NO: 909 - DNA, 186 bp, Homo sapiens
ccagcagttcctctttgccttatatttgtggtacgcccggccagccttcaagatgggtttgtcaattcggccacctccagccaccacaccaaccacagctctgttggctgaggagataaccttcttggagccggagggcagcttcacacgggtcttcttggtctcagggttgtgggagataacggt

SEQ ID NO: 910 - DNA, 385 bp, Homo sapiens
ccagggaggacggagactttgacctactccacatggagaggcaaccatgtctggaagtgactatgcctgagtcccagggtgcggcaggtaggaaacattcacagatgaagacagcagattccccacattctcatctttggcctgttcaatgaaaccattgtttgcccatctcttcttagtggaactttaggtctcttttcaagtctcctcagtcatcaatagttcctggggaaaaacagagctggtagacttgaagaggagcattgatgttgggtggcttttgttctttcactgagaaattcggaatacatttgtctcacccctgatattggttcctgatgcccccccaacaaaaataaataaataaattatggctgctttattt

SEQ ID NO: 911 - DNA, 467 bp, Homo sapiens
ctggcccccaggtggagagagatggggaaaaggaggcatcgcagaggaaatgtgatttcatgtgtgacaaacagtggcaaaacaacactggctaagaatttgcagaaacacctcccaaattgcagtgtcatatctcaggatgatttcttcaagccagagtctgagatagagacagataaaaatggatttttgcagtacgatgtgcttgaagcacttaacatggaaaaaatgatgtcagccatttcctgctggatggaaagcgcaagacactctgtggtatcaacagaccaggaaagtgctgaggaaattcccattttaatcatcgaaggttttcttctttttaattataagccccttgacgctatatggaatagaagctatttcctgacgattccatatgaagaatgtaaaaggaggaggagtacaagggtctatcagcctccagactctccgggatactttgatgg

SEQ ID NO: 912 - DNA, 435 bp, Homo sapiens
gatttggtgaagtaccttttggctaaagaccaggcgaagattcccatcaagcgctcggacatgctgaaggacatcatcaaagaatacactgatgtgtaccccgaaatcattgaacgagcaggctattccttggagaaggtatttgggattcaattgaaggaaattgataagaatgaccacttgtacattcttctcagcaccttagagcccactgatgcaggcatactgggaacgactaaggactcacccaagctgggtctgctcatggtgcttcttagcatcatcttcatgaatggaaatcggtccagtgaggctgtcatctgggaggtgctgcgcaagttggggctgcgccctgggatacatcattcactctttggggacgtgaagaagctcatcactgatgagtttgtgaagcagaagtacctggactatgcc

SEQ ID NO: 913 - DNA, 332 bp, Homo sapiens
aaatctgggatataaattaaagatcatatgcacagatcaatttatgttcttgtaataaacttattagaaattggtgtttgtgatagcattttacttgggttactagagatgcttctagtagaccttaatctagcatagttgaacctctgaatatgggaaggttgtattcccagattctttcctgaatagatttgaatttaatgtcatttgggaactccagggtgagtttattgactacccaaactgtattttaccaataaatatgcatatgatctttaattattgaagaaaataaagtgaggacttaaaacaattcatgaaagtggaccttt

SEQ ID NO: 914 - DNA, 468 bp, Homo sapiens
  misc_feature 364, 365: n = A,T,C or G
ccaaaacaaaggggctacaggccccatgcaagccccaaatccagcggggcagtccttaaatcttaaagcaccaaaaggatctcctttgtcttcatgtctcacacccagggcacactgatacaaggggtgggctcccatggctttgggcagctccttcgcaggctggcattgagtgcctgtggctattctgggcacacattgcaagctgtcagtggatctacaattccgggggctggaggacagtggcccttttcccacagctccactaggcagtgccccagtggggactctgtgtggggactccaaccccacatttcccttccacactaccctagcagaggtcctccatgacaccttgatttcnnatttctaccctccagaactataaaagaataaatttaagctactcagtttgtggtactttgttacaacagcactaggaaactaatatagtttattttctgaatt

SEQ ID NO: 915 - DNA, 519 bp, Homo sapiens
ctggtcggtctttcgttgccatggataccaaggatatccctcagattttacaacagatcttcacctccaccatgttgtcgagtgtctaagaagtgcccttcatcaccctgatgacaccaggatttgaaataagacaggaataaagagtattctgaaaaaaagaagatatggatgaagtgaacccatgcagtgactggatgattccggcattcctgggtcttcctacacttgctccgtaatgagaattcagagaagcagccagaaggagacttaaacatggaaagatactccactgatgagtttagaagtgattagggcaagctagttgacctgcactttatcaaaggttggggttaaaggaaggtggttttgagaactatgtgtttggtctatttccaaaaacctgagggggagaaaatactttgcttttgccttaacacatcatctggtcacgttagaaaagtgaccccatcaaactgagcctttgatgtcacattctgacacaagatgcaagtctgt

SEQ ID NO: 916 - DNA, 392 bp, Homo sapiens
ccttaacccttgccctgggagcccccaaggataataacatccctttctggggcaacaaaactgggaccgagtgggtaactgatatttgacaggggaacctaaacagtctacggaagtgtcctgagatgggcgtaaagtcaaacagaccaagcacacaggtaacactgaaataggaaagagtaagagcttctgttcaggctggaggtgctcgtatggtgggacaggaaaggggaaaagagaaaggggcaacatggcagacataccacggttcctacagagattaggggcagccctggcccgggaagtacacagggcagagagctgactctcaggtcaggaaggagtttagctctgacccatcctcagggaccacggctctcccccagcctcag

SEQ ID NO: 917 - DNA, 253 bp, Homo sapiens
ccagtattcctggaggatataacactgacatcagcagggttttcaatggcaacaattgcacgagctgccagcagaagcttctcccaggtcctcttgagatttatgatatagatgccatcacttttccttttatagatgtactgttccatctggaagtcaagattggtgccacctaagtgggttcctgctgcaaggaacttaaggacatcctcctccttcatttgcaggacatcaagggctccggacattgtga

SEQ ID NO: 918 - DNA, 324 bp, Homo sapiens
cctgggatggctcttgggcttgagggcctgttctggcaggatggcaagcagacactggacagggtcacttgggcggccgatatgccagcttccgactcttcaggactgaccacttgtgccgctttatggtgtagaccaggggcaccagcagagccatcatcatcaacatcttgagccccatgcgttttcgatggtcgtgctctggctcagatgcccagcgcaggaaggtgcacacatccttggctatctgggacatggtagctggggtgccatcgtcaaactctaagacatctgtgtagatgggaggggccatggcaatggcct

SEQ ID NO: 919 - DNA, 363 bp, Homo sapiens
ccagaaccaaccaggagctgcaggaaattaacagagtctacaaggaaatgtacaagactgatctggagaaggacattatttcggacacatctggtgacttccgcaagctgatggttgccctggcaaagggtagaagagcagaggatggctctgtcattgattatgaactgattgaccaagatgctcgggatctctatgacgctggagtgaagaggaaaggaactgatgttcccaagtggatcagcatcatgaccgagcggagcgtgccccacctccagaaagtatttgataggtacaagagttacagcccttatgacatgttggaaagcatcaggaaagaggttaaaggagacctggaaatgc

SEQ ID NO: 920 - DNA, 331 bp, Homo sapiens
aaatctgtgtatgtgctctatcacatttattacttgtgtatattaaatcatccctgcattaatggcatgaaacccacttgatcatggtggattttctttttgatatgttgttgaatttggttcattagtattttcttgaggatttttgcatctatgttcatcagggatattggtctgtagctttcttttttgttatgtccttccctggttttgatattatggtgaaactggcttcatagaatgatttgggggaggattctctctttttctatcttttggaatagtgtcaataggattggtaccaattctttgaatgtctgatagaattcag

SEQ ID NO: 921 - DNA, 201 bp, Homo sapiens
ccttatttctcttgtcctttcgtacagggaggaatttgaagtagatagaaaccgacctggattactccggtctgaactcagatcacgtagggctttaatcgttgaacaaacgaacctttaatagcggctgcaccatcgggatgtcctgatccaacatcgaggtcgtaaaccctattgttgatatggactctagaataggat

SEQ ID NO: 922 - DNA, 73 bp, Homo sapiens
tcatgaacttcgcatcaaaagacaattctttatacaacagtgctaaaaatgggacttcttttcacattcttat

SEQ ID NO: 923 - DNA, 545 bp, Homo sapiens
aaagcaagtcaccttagggtggctttaattgtataagtcaagcacatgtaataaattcaaaacctgtagttaacaggatattagacatcaatcctggtaaccaaatattaaagattctctttaaaaaagactgaacatgtttacaggtttgaattaggctaaaaggtcttgcagtggcttttcatggcccttcaaattggaatggaactactgtactttgccatttttctataaatcagtatttttttttaattttgatatacattgtgtgaaaaaagaaaatggctaataaactgtattaaatcttaaacaatgtataaagattgtacttagccagttcaaagtgtatatttattcataatgaattataacagttatatttttgtgttttcttgtaaatgtttcttttcccttaaatacagataattcatttgtattgcttattttattatgagctacaacaaaaggacttcaggaacaagtaatgtattagtatggttcaagattgttgataggaactgtctcaaaaggatggtggttatttt

SEQ ID NO: 924 - DNA, 426 bp, Homo sapiens
ctgcttacttcagtctggtgtcttcaaccaaaatatgtaccttataccaaaacaatgcttattccaaaatattttttgtagctagtagttctttccttggaggtaaagaaaatacacccaaacttttaattaccaggattcagaatatttaagagaacaattttagttaagaatcaaatatacagagattcaaagaggggaaaaaaaggaaatattatagaagacaaaggtcaaactggcattccagatctggagcaattttgtaaagcaggaaaacaactatgacaatctgtagcttcttagatcattatagtgaatgtccccatttactataagtgtttttataatggtgtttcctaaataaaggaacataaatgtacactaaagggtgtttcccaagaatagaggtgaagatattttcatttt

SEQ ID NO: 925 - DNA, 372 bp, Homo sapiens
ccttagggcgggaacacttttcaacccaagccaggcttcaggggcaagcccaccaacagaccccaatttccacaggggaggcagatcttctatacctacagtgacagaaaatacactaaagtgcagtataaaatataaaaaggtttgattctgaatagaccaactgctaattttccttaaaaaaatttttaatttggttgagtaaaaaccaaattagttcactgaatctcattttgtaggtaagagtcttatttgcaatacgaaaactggagcttatgactgctttgattttctctgtagcacaggataaccagtattagtggagaacactacaaaaggtggcttgtggtgagttctttgcatagtggtttt

SEQ ID NO: 926 - DNA, 64 bp, Homo sapiens
ccaattgggttcaccgtctgggggggctgcttattagtctcctggactaggggggcaaagagat

SEQ ID NO: 927 - DNA, 314 bp, Homo sapiens
  misc_feature 277: n = A,T,C or G
ctgcggtgcccggtactgcactgtgcgctgtctggggacccaccaggagaccaggtgtctgaagtggactgtgtgagcctgggcattcccagagaggaagggccgctgtgcactgcccggccttcagaaagacagaatttcatcacccaatgcagggggagctcttcctggaccaagggaggagccgctcattcacccaacaaaactgtgtcttatctgccaggaaagaccagcctcactcctgggaactgtctggcaggtaggctgggccccccantgctgttagaataaaaagcctcgtgccggaaaaaaaa

SEQ ID NO: 928 - DNA, 261 bp, Homo sapiens
ccatggctaggtttatagatagttgggtggttggtgtaaatgagtgaggcaggagtccgaggaggttagttgtggcaataaaaatgattaaggatactagtataagagatcaggttcgtcctttagtgttgtgtatggttatcatttgttttgaggttagtttgattagtcattgttgggtggtgattagtcggttgttgatgagatatttggaggtggggatcaatagagggggaaatagaatgatcagtactgcggcgg

SEQ ID NO: 929 - DNA, 495 bp, Homo sapiens
gctttttgaaaagtttaggttaaacctactgttgttagattaatgtatttgttgcttccctttatctggaatgtggcattagcttttttattttaaccctctttaattcttattcaattccatgacttaaggttggagagctaaacactgggatttttggataacagactgacagttttgcataattataatcggcattgtacatagaaaggatatggctaccttttgttaaatctgcactttctaaatatcaaaaaagggaaatgaagtataaatcaatttttgtataatctgtttgaaacatgagttttatttgcttaatattagggctttgccccttttctgtaagtctcttgggatcctgtgtagaagctgttctcattaaacaccaaacagttaagtccattctctggtactagctacaaattcggtttcatattctacttaacaatttaaataaactgaaatatttctaaaaaaaaaaaaaaacctgcc

SEQ ID NO: 930 - DNA, 88 bp, Homo sapiens
ggcgaattcacttactgaccggcctgggctgctctgagacatggaggaagccagtgaaggtggaggaaatgatcgtgtgcggacctgc

SEQ ID NO: 931 - DNA, 460 bp, Homo sapiens
aattaacagtgcgtatttgcctgaagaaggtcagtgtgcttgcttggagatcaggacgcaaaggtcaccatcagaaaagctaagtttgctgtatagtgaggatcaggagatctgatcctgattgcagaaccttccctgattacagaatcttggatgatttcacaaaagttcatcttcattgcagatacctgcctttctttctaggttgtatctcccacttcacccttctagaccatcccagaagatctataagatttcatctgggaaatcactaggagttcttggaagggaaagaaggaagattgttggttggaataaaaacagggttgaatgagttccagaaagcagggttctcaacctcgtggacagcaatctgcagaagaagagaacttcaaaaaaccaactagaagcaacatgcagagaagtaaaatgagaggggcctcctcaggaaagaagacag

SEQ ID NO: 932 - DNA, 495 bp, Homo sapiens
  misc_feature 360: n = A,T,C or G
ccttacaaataatactccaatgaatcagtccgtaccaagataccccaatgctgtaggattcccatcaaacagtggtcaaggactaatgcaccagcagcccatccaccccagtggctcacttaaccaaatgaacacacaaactatgcatccttcacagcctcagggaacttatgcctctccacctcccatgtcacccatgaaagcaatgagtaatccagcaggcactcctcctccacaagtcaggccgggaagtgctgggataccaatggaagttggcagttatccaaatatgccccatcctcagccatctcaccagccccctggtgccatgggaatcggacagaggaatatgggccccanaaacatgcagcagtctcgtccatttataggcatgtcctcggcaccaagggaattgactgggcacatgaggccaaatggttgtcctggtgttggccttggagacccacaagcaatccaggaacgactgatacctgg

SEQ ID NO: 933 - DNA, 310 bp, Homo sapiens
gccgaagatatgctcatgtggtgttgaggaaagcagacattgacctcaccaagagggcgggagaactcactgaggatgaggtggaacgtgtgatcaccattatgcagaatccacgccagtacaagatcccagactggttcttgaacagacagaaggatgtaaaggatggaaaatacagccaggtcctagccaatggtctggacaacaagctccgtgaagacctggagcgactgaagaagattcgggcccatagagggctgcgtcacttctggggccttcgtgtccgaggccagcacaccaagaccactgg

SEQ ID NO: 934 - DNA, 64 bp, Homo sapiens
aaaaaaaggtaagaaaggtcttcaggagatggtgagttttattttgtcttgtctggatagaggt

SEQ ID NO: 935 - DNA, 520 bp, Homo sapiens
agaagatggctgtgccacccacgtatgccgatcttggcaaatctgccagggatgtcttcaccaagggctatggatttggcttaataaagcttgatttgaaaacaaaatctgagaatggattggaatttacaagctcaggctcagccaacactgagaccaccaaagtgacgggcagtctggaaaccaagtacagatggactgagtacggcctgacgtttacagagaaatggaataccgacaatacactaggcaccgagattactgtggaagatcagcttgcacgtggactgaagctgaccttcgattcatccttctcacctaacactgggaaaaaaatgctaaaatcaagacagggtacaagcgggagcacattaacctgggctgcgacatggatttcgacattgctgggccttccatccggggtgctctggtgctaggttacgagggctggctggccggctaccagatgaattttgagactgcaaaatcccgagtgacccagagcaactttgcagttggc

SEQ ID NO: 936 - DNA, 443 bp, Homo sapiens
aaagattatagaggttgccactgaaagaaaaattttacacagtcactgtacatcaaggttgaaaaactgtcctgcatgaaaaatatacttagaaatcatgtgaataaaagaaaaaagaaaacattattgtgtttaaggaaagattaaagtcctcataatgtgccatctaaatgtggatactcattcttcttggagtcgctaagatgtagaaatttcttgcttctgcccttttcactcattatactgtgttttttcccaacagtattcattaaggcaaacaaatccctttctgaagaggtcttaaggaaattgtggacaaagcaaacttttggcattaaaacaggttaacatatacaaagcctttgtaatatacattaagcatatttttcttggactagtgacaagaaaagatgaacatgcttgttaacaatgtcaaaaagttt

SEQ ID NO: 937 - DNA, 290 bp, Homo sapiens
cgcaaaactaaccccctaataaaattaattaaccactcattcatcgacctccccaccccatccaacatctccgcatgatgaaacttcggctcactccttggcgcctgcctgatcctccaaatcaccacaggactattcctagccatgcactactcaccagacgcctcaaccgccttttcatcaatcgcccacatcactcgagacgtaaattatggctgaatcatccgctaccttcacgccaatggcgcctcaatattctttatctgcctcttcctacacatcgggcgagg

SEQ ID NO: 938 - DNA, 363 bp, Homo sapiens
cctatctggttggcctttttgaagacaccaacctgtgtgctatccatgccaaacgtgtaacaattatgccaaaagacatccagctagcacgccgcatacgtggagaacgtgcttaagaatccactatgatgggaaacatttcattctcaaaaaaaaaaaatttctcttcttcctgttattggtagttctgaacgttagatattttttttccatggggtcaaaaggtacctaagtatatgattgcgagtggaaaaataggggacagaaatcaggtattggcagtttttccattttcatttgtgtgtgaatttttaatataaatgcggagacgtaaagcattaatgcaagttaaaatgtttcagt

SEQ ID NO: 939 - DNA, 552 bp, Homo sapiens
aaatttaagacagttacatgtctttattacataaacatcataatatttctcataggagttggtcttcagtttgcttgttgctttcgcagaatgtcaaatatctatagaaaatgtctaattatttatgaacaaacattcccatccttgccccgcaaaaaatctcattgcctgcaattcctaaccagattcctgagaaaaataataggatttattttatagcatcatacatagattttctttcaagatataaaaaaggacaggcttctaaaacatgaatctcctttcgtttacaaagttctataaaaatacattaagtatgttcaaatgtttgttctttcactttatattccagtttaccagaaacaaaaaatggcagtacataaagatatgtaaaccacattaatcttgcagtaatataatgtcaacatcatcatgaacaccttgcagaagcagctctcctggatatgttacaatcttccttcgttttgcagctttaagagttcctaccaatgcttcaaagaggttggcacatttatcatcacggaagaggac

SEQ ID NO: 940 - DNA, 155 bp, Homo sapiens
aagaaggtgatctaagggccgcggcctcctccacacacacacacacaccaggggaaccaagagaaccacgtagaatcctcaaccgtgcggaccatcaaccttcgagaaattccagttgtctttttcccagccgcatcctgcctgtagatggccgg

SEQ ID NO: 941 - DNA, 465 bp, Homo sapiens
  misc_feature 405: n = A,T,C or G
ccacagaagttgctgctgacgctctgggtgaagaatggaagggttatgtggtccgaatcagtggtgggaacgacaaacaaggtttccccatgaagcagggtgtcttgacccatggccgtgtccgcctgctactgagtaaggggcattcctgttacagaccaaggagaactggagaaagaaagagaaaatcagttcgtggttgcattgtggatgcaaatctgagcgttctcaacttggttattgtaaaaaaaggagagaaggatattcctggactgactgatactacagtgcctcgccgcctgggccccaaaagagctagcagaatccgcaaacttttcaatctctctaaagaagatgatgtccgccagtatgttgtaagaaagcccttaaataaagaaggtaagnaaacctaggaccaaagcacccaagattcagcgtcttgttactccacgtgtcctgcagcac

SEQ ID NO: 942 - DNA, 407 bp, Homo sapiens
aaataaaaaacatttcaaattttgcacaaataatttaggccaatacataactagatttgaataaagtcagatgaagcaataattcctcctctgtgtttgaaaggaatgagtgtggttacaaagtcacaggatgagtccctgggatctggggtgggagaaggggtggatcaagaatgacttgggcttgtcactccctagcaggctgagggcgtgacacagcagctcggtggcggagaggtctattctagtttctaacactccaatgctaactttttggatgtatttccttctagcatgtagaaagggcttttcttggctgccaggaagtagggagcagggatgtggcatggtgatgatctgaggacagccaggcatatgctcagacactttggaaaactggggagggg

SEQ ID NO: 943 - DNA, 259 bp, Homo sapiens
ccaagaagcagtggccttattgcatcccaaaccacgcctcttgaccaggctgcctcccttgtggcagcaacggcacagctaattctactcacagtgcttttaagtgaaaatggtcgagaaagaggcaccaggaagccgtcctggcgcctggcagtccgtgggacgggatggttctggctgtttgagattctcaaaggagcgagcatgtcgtggacacacacagactatttttagattttcttttgcctttgcaaccagg

SEQ ID NO: 944 - DNA, 192 bp, Homo sapiens
ccaggaggttcccccgaccaggttggggagacttggggccagcgcttctggtctggtaaatatgtatgatgtgttgtgcttttttaaccaaggaggggccagtggattcccacagcacaaccggtcccttccatgccctgggatgcctcaccacacccaggtctcttcctttgctctgaggtcccttcaagg

SEQ ID NO: 945 - DNA, 86 bp, Homo sapiens
tgatactggctgagtttgcaatagcaggtggaaccctaactattgagggagtttgcagatacctcaggattcgtgacaatgccttt

SEQ ID NO: 946 - DNA, 299 bp, Homo sapiens
cctgcgttatatactagaaaaatttcttcattatatgcaaaatatttatctcctctagtaaaggagattaaagaacaactgcaagaggaaggaaggtcctgaaagtgtttcatttggtatctacctaccccaaccccaagacataaagacagataaaggcactaagatgctagtatgtggctagtcctttcaataacccagtcagtccatacagataacccatgggatatattcaagccactctttgagccatcgatggtcattatttggttagttcacccaaggtaaggccataccag

SEQ ID NO: 947 - DNA, 210 bp, Homo sapiens
ctgaagctgggggcctgggtcctaccctgtctggtcatgaccccattaggtatggagagctgggaggaggcattgtcacttcccaccaggatgcaggacttggggttgaggtgagtcatggcctcttgctggcaatggggtgggaggagtacccccaagtcctctcactcctccagcctggaatgtgaagtgactccccaacccctttgg

SEQ ID NO: 948 - DNA, 311 bp, Homo sapiens
ccagcatattttgcgagtactcaacaccaacatcgatgggcggcggaaaatagcctttgccatcactgccattaagggtgtgggccgaagatatgctcatgtggtgttgaggaaagcagacattgacctcaccaagagggcgggagaactcactgaggatgaggtggaacgtgtgatcaccattatgcagaatccacgccagtacaagatcccagactggttcttgaacagacagaaggatgtaaaggatggaaaatacagccaggtcctagccaatggtctggacaacaagctccgtgaagacctggagc

SEQ ID NO: 949 - DNA, 283 bp, Homo sapiens
  misc_feature 94: n = A,T,C or G
ctgcaatccatttatttcatttacaaaagatttattgtaagcctctcaatcttggtttttcagttgatcttaagcatgtcaattcataaaaacnagtcatttttgtatttttcatctttaagaatgcttaaaaaagctaatccctaaaatagttagatctttgtaaatgcatattaaataataaagtatgacccacattactttttatgggtgaaaataagacaaaaataatagttttagtgaggatggtgctgagtaaacataaaaactgatttgctctcag

SEQ ID NO: 950 - DNA, 204 bp, Homo sapiens
gaaaccttcaccgtgaagtcctgtcctgatgccatcaaagaggtcttcgacaataaattccacatcatcggcgcagtgggcatcggcattgccgtggtcatgatatttggcatgatcttcagtatgatcttgtgctgtgctatccgcaggaaccgcgagatggtctagagtcagcttacatccctgagcaggaaagtttaccca

SEQ ID NO: 951 - DNA, 121 bp, Homo sapiens
aaaaagctagaaccaatgataaatgatgcacttcagaaagaatccaagttccagaataatgtaattgtaattcctagtaccttaaagaatgaggttgtgtgtattttatttttcttaactc

SEQ ID NO: 952 - DNA, 359 bp, Homo sapiens
cctcacttcctgtagcttggggtgttatttaagcttctgccatctggcccacattaaaaaatgtatatgctttttctcctgttaatctgtctattgtcagcttgttttatagattcaaattcttaaaccttcaaggtctagaaaggaagttccttctacccctccaatagtataaagaagtggagccttttggtaggtgatagagtcatgagggccctgcctttaggcatagagttagtgcctttataaaagaggcccaggggggcttgtttgccccttctgccatgtgagaacacagcaagacagtgccatctgtgaagtagagagtgagccctcacgagatgtggaatctgctggtg

SEQ ID NO: 953 - DNA, 516 bp, Homo sapiens
aaatgactgtgctgcccctttgcatcttacaaagttaaacagctaaaagaagtaaaataagaaggcaatgcttgtggaatgtacagtgcatattggcggcgcacgcctcattacgattcgcctgcttgcttctcctgttcaatcgtttctttggaaggcagtggatttttctcttgcgtctctgtcttcttcagtttcgacttatcgaatttctcgatctcagccatatcgggtttgtcagacatggttgcggaggaaaagcgaagcgaggcgcctgcctttcccatctgtctatctatctggctggcagggaaggaaagaacttgcatgttggtgaaggaagaagtggggtggaagaagtggggtgggacgacagtgaaatctagagtaaaaccaagctggcccaaggtgtcctgcaggctgtaatgcagtttaatcagagtgccattttttttttgttcaaatgattttaattattggaatgcacaatttttttaatatgcaaataaaaagttt

SEQ ID NO: 954 - DNA, 555 bp, Homo sapiens
cctgacagacgcgggcagtgatgagccctgttctggagtggaaagagcacgatagagcaccaggctaagaggcacgagatcaaggcggtagtcacttccgctctgcagctagcatttcaaccatatgtggatcctttcatttctcagctccctggattccttcccctaaattaggacctattatttacctgtaggtaagcaagctactgtagctcttctgaggtatctgccaggctgttttctgtagcctcagattgcctacctgcttagcctgagaacaggtagatgaaaactaaactgatgcctaggcccagggtcagtctcagatggaagctgggcctgggtggggaggctagcatgcgtggctccctgggtatttctgtcagtccccatggcaagcagtgatttagtaaaacaccccagagtcagggaagccaaccaccttgaaacctttagaacatctctgctttggagaaagacccagagatcaggcagaggtgcagattcaatcattactcataacctttgagagatggcaaatgggaggagtgttag

SEQ ID NO: 955 - DNA, 173 bp, Homo sapiens
  misc_feature 54, 97, 119: n = A,T,C or G
gctttttttttttttttttttttttttttttaggggaaaataacttttattganaccccaccaactgcaaaatctgttcctggcattaagctccttnttcctttgcaattcggtctttnttcagtggtcccatgaatgctttcttctcctccatggtctggaagcggccatgg

SEQ ID NO: 956 - DNA, 350 bp, Homo sapiens
ctgaggagactccggcgctcgccatggccgacgaaaagcccaaggaaggagtcaagactgagaacaacgatcatattaatttgaaggtggcggggcaggatggttctgtggtgcagtttaagattaagaggcatacaccacttagtaaactaatgaaagcctattgtgaacgacagggattgtcaatgaggcagatcagattccgatttgacgggcaaccaatcaatgaaacagacacacctgcacagttggaaatggaggatgaagatacaattgatgtgttccaacagcagacgggaggtgtctactgaaaagggaacctgcttctttactccagaactctgttcttt

SEQ ID NO: 957 - DNA, 282 bp, Homo sapiens
aaagaacatttttattactttcaagtttatacagtaatctggcacaagctattgccagcattcctgccaagtacaaatgcttggacctccccttaatcaacagataaaatacataacttacatttaaggggagtggatacctcaaagtgcttaagtaaaaatttgttctctttaatagtttgaactgtcccttgttagtcgtgtctaaaacattgacctgaataatgagaaatcacaagctaatgttttacttattccttatatggtaagagactacctttt

SEQ ID NO: 958 - DNA, 209 bp, Homo sapiens
ctgaatcaactccaggtgcccgtagtcgtgataccaagagtagtagctgttcaaacagatcacatccacatacggagcccccttgtctgctgcatagttagagttgctcacaaaggtcacaggccgggaggggtccaaggatttggtgtgagcgatcaccatcttcaagtagtagccagcagattctaggtgggacgcaggctcgttgg

SEQ ID NO: 959 - DNA, 576 bp, Homo sapiens
ccatctgatctataaatgcggtggcatcgacaaaagaaccattgaaaaatttgagaaggaggctgctgagatgggaaagggctccttcaagtatgcctgggtcttggataaactgaaagctgagcgtgaacgtggtatcaccattgatatctccttgtggaaatttgagaccagcaagtactatgtgactatcattgatgccccaggacacagagactttatcaaaaacatgattacagggacatctcaggctgactgtgctgtcctgattgttgctgctggtgttggtgaatttgaagctggtatctccaagaatgggcagacccgagagcatgcccttctggcttacacactgggtgtgaaacaactaattgtcggtgttaacaaaatggattccactgagccaccctacagccagaagagatatgaggaaattgttaaggaagtcagcacttacattaagaaaattggctacaaccccgacacagtagcatttgttccaatttctggttggaatggtgacaacatgctggagccaagtgctaacatgccttggttcaagggatggaaagtcac

SEQ ID NO: 960 - DNA, 486 bp, Homo sapiens
aaaagaaacatgaaatcataaagcaaagctaacagccaaccaacaaataccgcctagcaatgatttccactggatgtgggagagggttaataaagacgctgttggtaacgcgtacagaactatcactggcaatcagcatactgagctatccagtggaggccagcatcgtgtttttgctaaaatacatgttgtagaagtcataattcatagtgaagaatctcaacaggttttcttacagatttaattactctcacacaaataattcatttggaaaccataaaagatacctatttacacctaaactgcctggccttccagagcggggactaaaggggcagggcggggaagaaagcgagcgtgtcgcgggctctgtggggttgcagggtcactgttattttgatctgctgagctcaaggactggaaacggaataaaaatgcctactcgccttaggcaggataagaagttgtaaactcacccatcagcag

SEQ ID NO: 961 - DNA, 324 bp, Homo sapiens
ccttggccgctgccgaactgctgaagaaagaaaagatcaacatccgcgtgctggaccccttcaccatcaagcccctggacagaaaactcattctcgacagcgctcgtgccaccaagggcaggatcctcaccgtggaggaccattattatgaaggtggcattggtgaggctgtgtccagtgcagtagtgggcgagcctggcatcactgtcacccacctggcagttaaccgggtaccaagaagtgggaagccggctgagctgctgaagatgtttggtatcgacagggatgccattgcacaagctgtgaggggcctcatcaccaagg

SEQ ID NO: 962 - DNA, 475 bp, Homo sapiens
ctgtcaggggcggcgtgcctggtgatgcggcatcttaccttcatccccatctcagaatgggcagccagtctcagattcaaggaggaggaatcctgaggtgtggcgttcagtcctgaggtagacctgaggtcccctggaaattgtgttgatgctgagatggatgaggggtgctcattctctcaggtagacagtgaggagtcctggttcagccgagcctccatgtctgcatggatggttatgaccctgattgtttttggaaacagccaagctctctaggtgtactcagcaaatgcaaggtatagtgggtcctgcatacccagggtattatttgagccatggaagcaaaacagagactgcttagcctccctaagagtagttggtgggagaggccagcaaccatggaggcaggagcagctcctctttgcctctgagtagtccccacatgttccctcttccagagatttcaactgccagg

SEQ ID NO: 963 - DNA, 202 bp, Homo sapiens
cctagtacaatcttgggaacagggttactgtatactgaaggtctgacagtagctcttagactcgcctatcttaggtagtcatgctgtgcattttttttttcattggtgtactgtgtttgatttgtctcatatatttggagtttttctgaaaaatggagcagtaatgcagcatcaacctattaaaatacattttaagcctttt

SEQ ID NO: 964 - DNA, 596 bp, Homo sapiens
  misc_feature 537, 590: n = A,T,C or G
ctgagaagagtgaggcagcgcctccggcccctcctgtgacgcacagcactcctgtaactgtctcagaaccactcctggagaaagacttccttgcaggagtgactcaagaattaatcaagactcttgaagacaactctgaaaagtgggctgtgattcccgatgcaggggatggtgtggtcaagccctcgtctagagcagaccccgcccagacctctgacacattagccttgaacaaccagatggtgacccagaacaggactccacacagcgtttgccaccagaaaccacaagcaaaatctggatcttgggacctccaaacttatagcgctgaccaacgcacaacaggaaactgggaatctcataggaagagccaggacatgaagaaaaggaaatatgatccatcttaactgaggctcaggccacataattggactctgtcacaaagggactttggaaaactactttttggtcatgaaattgttcatcgctgctggagaatgaacgtcattgcaatttatcttgcttcattctgaaccnttatcaaaaggatctgactgagagcccactgcagttagagctgagcacttttnaaaagc

SEQ ID NO: 965 - DNA, 400 bp, Homo sapiens
aaattttacaccttttcttaagaattctaatgccgtcttaagtttttataccaataatgctgagctttaagtgtaggatctggtagtacagacagtgtgatggatgatgctgctggttgtaaatttcatcgtgtgtgtctaattttttttcctgttgaatgggtaaaaacaaaacaaaactttttttagaagatgaatttgctgtcatgttttgtggaatgagggaccgttgagctcactaccacctggagtttgagttgaagcatgaaaatggtgcccatgcctgacgctccagcgcctggatctgcacgtgcccttgtagaggatccttaccgtcctagagagcagacgctttctgaaaactacttgctccaaaagaccctctgagttaacgtttcag

SEQ ID NO: 966 - DNA, 268 bp, Homo sapiens
ctggggggcttcctccagaccaccggcctcggccccggcatccctgttgggcgtcagcctgagagtccctactgtgcgtcagaatccaccttgcgtgctgtgcgtatctgtgaacctggagcggttacttattttgacagatatcactttgggtctttttacattaaatttcttttctctaaggaatataagacataccccatagctctgtgtgagccagcaataccgctgccccctggcgacagggcagaccaatgatgccaggcag

SEQ ID NO: 967 - DNA, 544 bp, Homo sapiens
aaaatactacatgacattctgtctattcaatcacctggtggtcatctttcttgtactaattaactgttgatgagcattttggatattctaggagaaagcctataatttcacatagtttctctttttcatgtaactgtaacctaaatgtattacttctgataaaactatatatcaaatgtcactgcaaattagttttatatctgtcatgtgagatttgtcttacttatttttcttttggttgccatggaagttatggccctgaaaatcgtctccctccccttctcttgctgtacagcatgcgttctctttttgtggttgctggctgggtactgtatttaatgaagtagagaatagcacttgcaaaaatacagtcttggtacctagagactgtcatgcagatagtataatttggtatatgtgctaatgcattgagtaaaggattattttaacacactattttgcttttgtattttagttaaaataatcgatggggatgtgtagcccccccgtgtgaggatgacatcaccacatttctagtttcatg

SEQ ID NO: 968 - DNA, 345 bp, Homo sapiens
ctgacgtggaagccctgggtgggcgtcccctggctggcctggcttttgggttcaagtctgtatgtatggagtgggttggggccccaaagctttgctgctattgatttgtccccgacagcaggcaaagcctcacattgccctcaattttccccctttcatttgaaggaccagtttttcatggtacttgtcttgatctttttcatagtgttcaaatctgtatttttgtatgtagagggaaataattttctcaacactaatcgttaataactattgtattaaattgtcatgaaggaacttgtttaataaatggacgtgtaaggaaaaaaaaaaaaaaaaaaaaaaaaa

SEQ ID NO: 969 - DNA, 341 bp, Homo sapiens
  misc_feature 31, 111, 114, 153, 293, 326: n = A,T,C or G
ctgcccaagggcgttcgtaacgggaatgccnaagcgtgggaaaaagggagcggtggcggaagacggggatgagctcaggacagagccagaggccaagaagagtaagacggncgnaaagaaaaatgacaaagaggcagcatggagagggcccanccctgtatgaggaccccccagatcagaaacctcacccagtggcaaacctgccacactcaagatctgctcttggaatgtggatgggcttcgagcctggattaagaagaaaggattagattgggtaaaggaagaagccccanatatactgtgccttcaagagaccaaatgttcanagaacaaactaccag

SEQ ID NO: 970 - DNA, 345 bp, Homo sapiens
aaaccctgcgtggcaatccctgacgcaccgccgtgatgcccagggaagacagggcgacctggaagtccaactacttccttaagatcatccaactattggatgattatccgaaatgtttcattgtgggagcagacaatgtgggctccaagcagatgcagcagatccgcatgtcccttcgcgggaaggctgtggtgctgatgggcaagaacaccatgatgcgcaaggccatccgagggcacctggaaaacaacccagctctggagaaactgctgcctcatatccgggggaatgtgggctttgtgttcaccaaggaggacctcactgagatcagggacatgttgctgg

SEQ ID NO: 971 - DNA, 250 bp, Homo sapiens
ctggagggctcacccatgagggacacgggtggacacccactgcttcacatgcctaattcacattagaaacatgtaaagccattcagtctgtgcaatagagagatcctgtatgaaatccactcattccttggagggaagctggcccggaggcacgctctggttgacgggtgacgcacagtcctccagggcctgcattgcatccatgacacagacacacgtgaacacccagcccgccggtcctagcagccag

SEQ ID NO: 972 - DNA, 304 bp, Homo sapiens
ctgtatagcatcttcactgtaaaggaggtaagtaactccctaagctagcatgttaagtgctgacattgggagaaaatacattacaaagaacaggagctggtttttggttttccttgtggctgtgtttttgattgaagggatgtgggatggtggtgacagaagtctgagcatagtttctgaataattggaggggagatgggcattctttgggactatgtccgcattacattgagttttctccctctaggaagagagagtttgtgttttattttctgtaagtaaaagctacatgtttaggattttt

SEQ ID NO: 973 - DNA, 541 bp, Homo sapiens
  misc_feature 488: n = A,T,C or G
gccgcgtccgttcaccgcggcctcagatgaatgcggctgttaagacctgcaataatccagaatgactactctgatctatgttgataaggaaaatggagaaccaggcacccgtgtggttgctaaggatgggctgaagctggggtctggaccttcaatcaaagccttagatgggagatctcaagtttcaacaccacgttttggcaaaacgttcgatgccccaccagccttacctaaagctactagaaaggctttgggaactgtcaacagagctacagaaaagtctgtaaagaccaagggacccctcaaacaaaaacagccaagcttttctgccaaaaagatgactgagaagactgttaaagcaaaaagctctgttcctgcctcagatgatgcctatccagaaatagaaaaattctttcccttcaatcctctagacttcgagagttttgacctgcctgaagagcaccagattgcgcacctccccttgagtngagtgcctctcatgatccttgacgaggagagagagcttgaaaagctgtttcag

SEQ ID NO: 974 - DNA, 578 bp, Homo sapiens
  misc_feature 499, 503, 550: n = A,T,C or G
aaaaaaaaaaaaagtcaccagcaagtagtcccgggtgggaggtgggagcagaataaaaaaaatctgcaatgattcctaattgtttttcaatacagaagcttgggaaggggtttctgccagtttcatgaggaaggcacaacttccaggtagtgttggggaagggtatgaggtcctatgcaggctggcctcttatcccacagatgccaagatgatgtctactggcagctcctccaaacttctggctgtcacctgcattgtcactgtgtccaaaagcagcagccgggagcgcaccaggatgtcatgaccaccccggaacacaccagccaggagcaacgtgtgggtgttcttgttatccggcactttgtctgacctctcacaagggtgcattcccaagaacttcacaatattacccacagcctcttcaagtgtcttgatggtagacaaggtgaacgtttcctccttctcaaattcatcccctacctcatcccaggctgcttcnaaanttcagtttcatgaccttttgaatgtgatcagctacagtaacttccanatcttccagcacatactcatcctcatag

SEQ ID NO: 975 - DNA, 412 bp, Homo sapiens
aaacctttatactcccctgaatgaatttgaagaacgggtaacagtggcctttatacgaacaatccaggcacaactacaagagcggaatgaccctcagcaactgctattagatgccaagcacatgtttcctgttttgtttccatttaatccatcttctctaaccatggactcaatccacatcccagcgtgtctcaatctggaattcctcaatgaagtctgaagatgcatgtttccagcattagtttgattcccaatgtgagcaagaaggaagtatatacagtaaagtaaattcaaggatctgttaaatctggtaaaagtagatcaaatcagagattgacagcctgtggagggtgctgaactatacagaattagacacaactatgtcattattttttgtacctactgctcagaa

SEQ ID NO: 976 - DNA, 440 bp, Homo sapiens
ggcaggagaatggcgcgaacccgggagacggaggttgcagtgagccgagatcacgccactgcactccagcctgggcgacagagcgagacttcatctcaaaaaaaagaaaaaaaaaggtattcataaggtacctcgagggatgatgaaatgagtaacttgacaaatctttggggcttggaaaagtctactctacatcacttggggcagggcatgacatagcatatatttgggatacacatgcctgacagcccagtcttcatttgaggaatctgggatcaatacatgatccaaatcttggtactgtgggtcttgtatttggatttccatgtggatttcatttcggccagggctggagttactgtccctgttcatgatggtggtgctggtgacctatggggcatcctaacttccttcccaggcagatgtccctgctgcattgg

SEQ ID NO: 977 - DNA, 227 bp, Homo sapiens
ccgggcaggtccataatttattatctcaccacaaggcacaatacacagagctttgagggtccaatacagtcatcgtgacagaacgcaccgcagccttggcacatgatcatggctttcaggctgcacgcacactggagcgagatgctttccaccgtgctgctgtcagtgaacatttgcaaggaaagtgatgcactgtggctcgcaccaaagtttgctttgtggctcag

SEQ ID NO: 978 - DNA, 399 bp, Homo sapiens
gccaaagaggtcgaagtggttctggaaactttggtggtggtcgtggaggtggtttcggtgggaatgacaacttcggtcgtggaggaaacttcagtggtcgtggtggctttggtggcagccgtggtggtggtggatatggtggcagtggggatggctataatggatttggtaatgatggaagcaattttggaggtggtggaagctacaatgattttgggaattacaacaatcagtcttcaaattttggacccatgaagggaggaaattttggaggcagaagctctggcccctatggcggtggaggccaatactttgcaaaaccacgaaaccaaggtggctatggcggttccagcagcagcagtagctatggcagtggcagaagattttaattaggaaaca

SEQ ID NO: 979 - DNA, 381 bp, Homo sapiens
aaacttgggaagagtcataattctgggatgtttcacatgttgtcagctttaaccttctacagacacaggccctctcctctgtgaggagggacctctggcatgtgtgggtgtgtggtgggtccctctccctattagcagaaatgtgttgggcatgagccaggtttatgatttggattgtgtcctgcacataacacctgtgagaatacaactgggactaggacaatgcgggaagcatattcttcatgaggcggtaaccaaaaggcttggctataccaaaggattctggtggccgggcacggtggctcacacctgtaatgccagcactttgggaggccaaggcgggtagatcacttgaggtccaggagttcgagcccagcctgg

SEQ ID NO: 980 - DNA, 373 bp, Homo sapiens
ccacaaatggcgtggtccatgtcatcaccaatgttctgcagcctccagccaacagacctcaggaaagaggggatgaacttgcagactctgcgcttgagatcttcaaacaagcatcagcgttttccagggcttcccagaggtctgtgcgactagcccctgtctatcaaaagttattagagaggatgaagcattagcttgaagcactacaggaggaatgcaccacggcagctctccgccaatttctctcagatttccacagagactgtttgaatgttttcaaaaccaagtatcacactttaatgtacatgggccgcaccataatgagatgtgagccttgtgcatgtgggggaggagggagagagatgtacttttt

SEQ ID NO: 981 - DNA, 486 bp, Homo sapiens
  misc_feature 473: n = A,T,C or G
cctcctcagacactctcaagaggatggggagatgacaccacttgggtacaaacttatgaagaaggtctcttttatgctcaaaaaagtaagaagccattaatggttattcatcacctggaggattgtcaatactctcaagcactaaagaaagtatttgcccaaaatgaagaaatacaagaaatggctcagaataagttcatcatgctaaaccttatgcatgaaaccactgataagaatttatcacctgatgggcaatatgtgcctagaatcatgtttgtagacccttctttaacagttagagctgacatagctggaagatactctaacagattgtacacatatgagcctcgggatttacccctattgatagaaaacatgaagaaagcattaagacttattcagtcagagctataagagatgatagaaaaaagccttcacttcaaagaagtcaaatttcatgaagaaaacctctngcacattgacaaa

SEQ ID NO: 982 - DNA, 448 bp, Homo sapiens
ccagactcctggaagagcagggtcatgctggctgggacacagtagaggggttttatatctggagggtgatagggctgttccctgctaccctcctggatagtctgggaggtcggggagggctcgggtatgacgaaagatgtaatcctcgggtgtttccagtccacagccacaatgctctccacccctttgctcagctccttcacctgtataatctgctcctgctgcatttgctgcaggaacttagagagctttttgtagcttgacttctttatgtccagttgtcgtccttcggggcagcaggagaacatgtggctgccaaggaaagtgctggtgagtaaagggaggtcagcctttttgactcggcacttcaaggcatgtaagaagcattgctgtaacagctcatccatttgttcttgaagcgttttgctatctgtggagtcttggttca

SEQ ID NO: 983 - DNA, 476 bp, Homo sapiens
ctgcatcacggggaacacagcatctcctggatgcaggaagctgcaagcatctggaatgcttattaatttaccccacaaataaatacaaaaggtcaatcttcccagtggaaatgattccatcgatttttgtgactttctgatgagaatgctaaaaagaagagttgccccttttctaaaattccaaatctttcctttttgaagatgactacatgtgaaagaaataaaatgtgaaaagatttgttaaggatgactggctctagtaccaactaaatgccaagggggactgtaagtcactgaggtgacacaaagcagccatgggttttcctcgccttttttatggggaaaatgcacctttcaatcctagaagataattggacttggcaaagtccctatcggtagcaactattttcttactttaaaaaaaaaagggtgagctgggagccagactgtgcacatcagccaagattgctattgcc

SEQ ID NO: 984 - DNA, 333 bp, Homo sapiens
ccacttggcccaggtagaagtagatgaagtgtttggtttcatgtgtcacataactaccgaagttcctccccacgatgcaatgccaggtgggattgtacttcttgtcaaattccttcttgatatgagccgcaatgtccttctctatgttgtatttctccagcgcctgagtagcgcactccaccgagtcctgttgcatctcttccgacatgtccgcatttttgatcacggcctttcggtcgcacatggttaccgtggagaagggggctggccgactgcaacggtctcctgggggaggtgctagcacagctcaggcccggctagagctaccgtcgc

SEQ ID NO: 985 - DNA, 181 bp, Homo sapiens
gggttatcgaatggtggtgaatgaaggttcagatggtggacagtctgtctatcacgttcatctccatgttcttggaggtcggcaaatgcattggcctcctggttaagcacgttttggggataattttctcttctttaggcaatgattaagttaggcaatttccagtatgttaagtaacaca

SEQ ID NO: 986 - DNA, 382 bp, Homo sapiens
ctggccaagaaccgcctctatcaggccagtcagagagctgatgacatcttggacctgaagttctgcatggatggagttcagactgctttgaggagtgaagattatgagcaggctgcagcacatattcatcgctacttgtgcctggacaagtcggtcattgagctcagccgacagggcaaagaggggagcatgattgatgccaacctgaaattgctgcaggaagctgagcaacgtctcaaagccattgtggcagagaagtttgccattgccaccaaggaaggtgatctgccccaggtggagcgcttcttcaagatcttcccactgctgggtttgcatgaggagggattaagaaagttctcggagtacctttgcaagcaggtgg

SEQ ID NO: 987 - DNA, 531 bp, Homo sapiens
  misc_feature 7, 33, 34: n = A,T,C or G
tacgacncactatagggcgaattgggccctctnnatgcatgctcgagcggccgcccgggcaggtctgctctagcacctgacttcctggtagtcagggtaccagggagagggaggagcaccagggtgggggatatttaggggacctctttccttcaggaccacacccttctaggtgaaagcacaaacacttgattactttgcattccatctgcaaaaacagatttaggttttgaatatggtgaaaaacgaagaaaggaaaatataaaactctgtattttatatacagtaaggaataatggaggctgataatgatcttgtgatcagctaagacaatgtcagtaagcaggtgaggtagggtgctttctatgggcaaaagggcgaatatcttgaatgaccagaaatgactcgaagagctgcattactatcatggtagcatgcatgaagtgatacatctaaacctttgctaacctaacattattactctcaagctttattatcctcaaggcttaaatggctgtagctgtttaattt

SEQ ID NO: 988 - DNA, 183 bp, Homo sapiens
ccttcttcaacagcgactctaggaagagctcgagcgcccgggagatgatgacaggcaccgccgccgccaccttcccaatctcttcgtccgtctgcatgatcttcttgatccgcgccggcgggaaccgcgcgttgtacttcttcttcttgctcggcatctcggggcctctctcgccgcgtcggg

SEQ ID NO: 989 - DNA, 350 bp, Homo sapiens
ccaaaaacaaaaaagaaaaaaaacatgacatctgtcatgtaaaacctttttttatccctatgggacttgaggaacagaatcagtacttcagttattgtaaatagtgagctaaacctcaaatttctatcacccagttgcccttttcatgaactaaacaattatctgtgtgattggtatgtttcaccaggtcactgctcatgtataacagtactctttatttgtagataccttttttgtatatatttattattgtaaatcatgtgctgccaccagcagtctgtaagtctaaactattaaatgacacatttatatttggaattttaatttttaactaagcgatcaagtttttt

SEQ ID NO: 990 - DNA, 496 bp, Homo sapiens
aaatgatttttattacggtgtggtcacttatttagatggacattgcttttcaaataacttaaaataacacgttatgtgccatgtggctactttagtaatattgccaagaagagcacagtttttacactagtggcatctcagtgaaattaaccaaagatgaagctttggctttgctggtgagatcagagccctcctgagcaggcagcgccactccagggttcagacagggctgcacaggcggcagagatacagggtctgagggctgagacgccatggggccgctgctgcttatgtggttggattgtttacaagcctcattattaaaactgaaggcattttttttttctgctgcctttcccaaagtggttaggtttggaaaagagatgatgatggtaatattttatttgtgctttttaagccatttccccaaatgggactagcatgcttgttttcagtataccgtggcctgcctcatgatggtttggagatactgtct

SEQ ID NO: 991 - DNA, 450 bp, Homo sapiens
aaaaaacttcgaaagtcacagacacagaatttaggaagctgaaggctgagagtctcccttctcacttaatccatgctttattttgcattcctcacaggtaaggaggcagtgcctgttatgctgtggaccaaaaccagccccacggagctgatcttcaaaaaaatggaatttactctggcatactcctatgtatgatacctttccaaggccaaatcccaagagaccagcaagtgcaactttgggcaatgatccaaatctagaattagctgccaaataaccttggtagactagtccctgggtgacaagcatgcttacaagagaaaaaggcagagctctcttccagaaactttcttcctgacattctcgcataatctttgagatctctgctctgtggatgtgcagttttgattttggacaaaacaacaggctctgcttgcttggtggtggaaa

SEQ ID NO: 992 - DNA, 449 bp, Homo sapiens
  misc_feature 57, 141, 157, 212, 442: n = A,T,C or G
aaactgtctaaaaaaaaaaaaaaaaaaaaaaaaaaaaagcttgtacaaaacctacanacttatttcttcttggacacacccacggtgcggccacggcggccagtggtcttggtgtgctggcctcggacacgaaggccccanaagtgacgcagccctntatgggcccgaatcttcttcagtcgctccaggtcttcacggagcttgttgtccanaccattggctaggacctggctgtattttccatcctttacatccttctgtctgttcaagaaccagtctgggatcttgtactggcgtggattctgcataatggtgatcacacgttccacctcatcctcagtgagttctcccgccctcttggtgaggtcaatgtctgctttcctcaacaccacatgagcatatcttcggcccacacccttaatggcagtgatggcaaaggctnttttccg

SEQ ID NO: 993 - DNA, 459 bp, Homo sapiens
  misc_feature 381: n = A,T,C or G
ctggaacagtatatgaagacctgaggtataagctctcgctagagttccccagtggctacccttacaatgcgcccacagtgaagttcctcacgccctgctatcaccccaacgtggacacccagggtaacatatgcctggacatcctgaaggaaaagtggtctgccctgtatgatgtcaggaccattctgctctccatccagagccttctaggagaacccaacattgatagtcccttgaacacacatgctgccgagctctggaaaaaccccacagcttttaagaagtacctgcaagaaacctactcaaagcaggtcaccagccaggagccctgacccaggctgcccagcctgtccttgtgtcgtctttttaatttttccttanatggtctgtcctttttgtgatttctgtataggactctttatcttgagctgtggtatttttgttttgtttttgtctttt

SEQ ID NO: 994 - DNA, 458 bp, Homo sapiens
aggagggctcacagctcgaagaaccatcatcatcaagggctatgtgcctcccacaggcaagagctttgctatcaacttcaaggtgggctcctcaggggacatagctctgcacattaatccccgcatgggcaacggtaccgtggtccggaacagccttctgaatggctcgtggggatccgaggagaagaagatcacccacaacccatttggtcccggacagttctttgatctgtccattcgctgtggcttggatcgcttcaaggtttacgccaatggaaactctagatcagaattgttgacttgcattcagaacataaatgcacaaaatctgtacatgtctcccatcagaaagattcattggcatgccacaggggattctcctccttcatcctgtaaaggtcaacaataaaaaccaaattatggggctgcttttatcacactagcatagagaatgtgtt

SEQ ID NO: 995 - DNA, 402 bp, Homo sapiens
  misc_feature 398: n = A,T,C or G
ccagtttcagttcttcagcagaactgtctcccttcttgggggccgagggcttcctggggaagaggatgagtttggagcggtactccttcagccgctgcacgttggcctgcagggactccgtggacttgttccgcctcctcggatccacagaaatgccgatggtcacctgcccgggcggccgcccgggcaggtaaaaaaaaaattccagaatgggtaagagaacaatcatcaaggatgtaggtgccagacacagggcagaaggtagctagaaaagtatgccttagggaagttaaaggtctagcctcattcctaccttgttttaatagctgtacctaatataaatagctaagtttcccattgttctagattcctctgccccatctacaaacatggcacanccag

SEQ ID NO: 996 - DNA, 487 bp, Homo sapiens
ctgtttcaaagttggggtctgttcttgaatcccctattaattactgtgtgtgagccagagggagctgtggtaagggttgggcccccagcctgtagggaactttctggactcccactctttgaatcgatataggcatttggtctcactacttgaccattctcaccctgtgaaacgtcccacactttgaagcaaatacaattcacagcacagtacacacaaaaaccttggcataagacagagaaggttcttcttattttgtgggctggttgctgtagaaacacataacaaagggcagccctccacttctggtataattgtgtagccccttttctttgggcttgacacctgtcttgaataagagtgattagagctgcataatgtccctctcttggctattgaccatgtggttcacgtacaaaactctgtataagttgaaggaaaatgttcatgttcatatgtacttgtttgctatgactacattttgagg

SEQ ID NO: 997 - DNA, 529 bp, Homo sapiens
  misc_feature 411, 485: n = A,T,C or G
cctgacattcctgccttcttatattaataagacaaaacaaaatagtgttgaagtgttggagcggcgaaaatttttggggggtggtatggagagagaatgggcgatgtttctcagggctgcttcaagtgggattggggcggcgtgggaacataaagtgggagagattaagctgaagggaagtcttgtggtaagggatgatattgtggggatgttagaagaaacatttgtcatatagaatgattggtgatggcctggacacagttttggatgaactgagaagctaaatggaagatacaaggtctgaataaaaggaggagaaaaatgggtattaaaggactaagaattgggaggacccaggacatccaattagagagtgcccaagggggttcagcgtaattacttgcttggttngcaagtttttgggctctatccttgagtttttttatgttgtcatacaccaggccagactgatttaggtaaaaacnacactcctcatttaagaatatgcagagtcctcctttttcagcag

SEQ ID NO: 998 - DNA, 509 bp, Homo sapiens
  misc_feature 496: n = A,T,C or G
ccaggctggttttgatctcctgacctcaagcgatccactgtcctcggcctcccaaagtgttgagattacaggtgtgagccaccatgctcgctgagagcagatatttgaaatgtcactttgagttctgagaaaaagtaaaaagccagaagacatactagatatataaatatattactgcttaaaaagatttcctaaaaagaaatgtatcaagtgtatgaatcaaagtctgaaagaaagatgaagagccaccagacttctgggtaggtttacatccatcatgttcctcttgactgcctttgtttgtcgtttagttttttgctccactcaagcctgttagaatcaccatggaatacagctccagtgggaaggccactggagaagctgatgtgcactttgagacccatgaggatgctgttgcagcgatgctcaaggatcggtcccacgttcatcataggtatattgaactgttcctgaattcatgtccaaaaggaaaatnagactctaggggc

SEQ ID NO: 999 - DNA, 307 bp, Homo sapiens
  misc_feature 71, 90, 154, 157, 159, 197, 215, 247, 256, 269, 299: n = A,T,C or G
ttttttttttttttttttttttttttctgggaaaagtttctttaataaaaaagttctagtacatatacacnattgtcctcacccttcatntatagcaacgcaacagggaaaataaaaaataaggggcaacctaggcacactcagtataaaaacncananatccatccgaatgggaggcattggggtctggaaaccanaaatgcaggacggccagngggcccagcagctctgggctgcacttttgaanaactttctntaacgttttgaanatagcattaaaaaaaaaaaattaagttgcnccaggagg

SEQ ID NO: 1000 - DNA, 269 bp, Homo sapiens
ccaaacagaagagaaggcagaggcccaccaagagctgatgctgcgcagtccttgggggatcatcctccggtctcactggggacgaacccaggttctggagcctctcccctgacagacagcttgtcaccggcacttatgggtcctctgggatttcagacaatacccaacttctgtaggttcagaaagtgctttcaagcaggcagtggcacccacacccggtgggacacacctcctgggtccgaaaccactccatcatgtggctggtgtgg

SEQ ID NO: 1001 - DNA, 469 bp, Homo sapiens
  misc_feature 248, 250, 256, 265, 414, 448, 462: n = A,T,C or G
ccatcaaggcagcaaatctaatgactccggggaagaagcagaaaaagagtttatttttgtgtaaaggtcacccacgcagaagtcttcctgtgcagggtgctttggtagccatcagagaggaaccaagggcaacatcttttcttcccaggcgttcttctctgggtgctttattctcttctttttctttatttcgcccccacccccatcccctgcctttttttttttttttttttttttttttttgggananaaacanatccatttnttggtaatcaaagcacatttgtttggtcttcctccaaccctttgcatttgatttctaaacattccttcatatgcctttaatgaaagccagcaattatcccatgggccctacttgaatttatctgaggcagctacagattgccctgcaanatgagtttttggagataaatgaaataactggacncacactcacacaangtaacac

SEQ ID NO: 1002 - DNA, 471 bp, Homo sapiens
ccagttgaatgggggaagctgctggcacaggaaggagaggcgatcccggctgaggcttaggaaattgctggagccggctccaagcagataattcactggggaggttttcagagtcaaacatcattctgcctgtgttgggggccaggtgtgtcacacaagcatctcaaagtcaaaagccatctggggctgctgcttctctttctcaggctctggggaaaggaatctccctctcctctcacttgattccaagtgtggttgaattgtctggagcactgggactttttttctcttttccttgatggaccaacagtgcaaatgcaatctcgccatttaactttcaggtcgatttcctttcctgatcagacatctttgtgccccctttaggaaggaaagaatacacctacgatgtgccaggcactgtgttaggcgcttttatatagatcctcgttaggatgagactaagggatgagg

SEQ ID NO: 1003 - DNA, 323 bp, Homo sapiens
  misc_feature 184, 249, 251, 272, 287, 323: n = A,T,C or G
ctgtatgcgtggtccacaggtgtcctttgccttgggtagcctttacaggccgaatttttttttttttttttttttttttttttgagatggagtcttgctctgtcacccaggctggagcgcagtggcacgatcttggctcactgcaacctccgcctcccgggttcaagtgattctcctggctcancctcctgagtagctgggattacaggtgcctgccacacacctggctaatttttgtatttttagtananaaaaaggtgatggtgaggaanaggatggagatgaanatgaggaagctgagtcagctacgggcaagcgggcan

SEQ ID NO: 1004 - DNA, 531 bp, Homo sapiens
aaatgcattttatttttagacaacctacatgacatgtttttcttaaaaacaatgcctccactccaaataaatcacagtcaaaataaatgaagagctcaagatgacatcagtcccatttgtcttaagtcctggtgttgtgtggatgacaagcagaagccagttatgatgacaggtgatagatccaaaataattgccacatttgttaacatttttccatttctaaaccatccttaaagaaaatcatatatggggtcacaccatcctcacggtagtccaatagagcaaccatgccatctggattcatgttttcaccaataaagaactggtagtttttgaaattagcaaggatgtgcttgatttgttctgcagtccctgtcataaaaggttttactctttctggtctctgttcttcaagtttccctttgattgatttcatgtaatctttgatgtacttcttgtaggcttcttttgtgaaacttgtttcctgcaggtgatggttcatgacaatatcgacaccagtgattactgtgc

SEQ ID NO: 1005 - DNA, 384 bp, Homo sapiens
ccaggtgaggccaggacctcacggcctcctttgtgttgtccatggaagaccaacttccgggcaactgaagggaggtttgtagggtccactaggaccccctggagcatcttggaggaggtctgcggacatgggggctgggtggcaaaggaaatacagacctcaaagtggcctacaactccctccagggtgggtcccctcgagggatattcccaggccccttggaagggtaaggcaggggggctttgcctcccagctttgtcttccggtagttaaggcgcttgaaagcttccaggtcccggtgggtgcccatgatcagccggttcaggttggagagctcaacgatgaggccacgcacgacgttggtggcatcctccatcctggagg

SEQ ID NO: 1006 - DNA, 510 bp, Homo sapiens
ccgaagtggactggcccctgggtcagtctggtgggaggacggtgcaacccaaggactgagggactctgaagcctctgggaaatgagaaggcagccaccagcgaatgctaggtctcagactaagcctacctgctctccaagtctcagtggcttcatctgtcaagtgggatctgtcacaccagccatacttatctctctgtgctgtggaagcaacaggaatcaagagctgccctccttgtccacccacctatgtgccaactgttgtaactaggctcagagatgtgcacccatgggctctgacagaaagcagatacctcaccctgctacacatacaggatttgaactcagatctgtctgataggaatgtgaaagcacagactcttactgctaacttttgtgtatcgtaaccagccagatcctcttggttatttgtttaccacttgtattattaatgccattatccctgaattccccttgccaccccaccctccctggagtgtggctgaggagg

SEQ ID NO: 1007 - DNA, 229 bp, Homo sapiens
cctgattcactggcctggcggagatgcttctaaggcatggtcgggggagagggccaacaactgtccctccttgagcaccagccccacccaagcaagcagacatttatcttttgggtctgtcctctctgttgcctttttacagccaacttttctagacctgttttgcttttgtaacttgaagatatttattctgggttttgtagcatttttattaatatggtgacttttt

SEQ ID NO: 1008 - DNA, 370 bp, Homo sapiens
aaagaaaaagacaaaagaaagtggaagtggtattccccacccctccctgcacccatgtgcctgggcttcccctttatttcccttttccatttaccccgtaatgtgtctctacagctaccttaccactgagccgtaagacaaatgtataggaagaagcaaagtctacagcacatagtctttgtaagggattgatgtgaacacttttttttggatgcactaaggagttatcaatacttctggctttatgagagctcttaaattttgtctaaaaaaccaaagggctgtgagtaagggagctatgtggaaagtgggactctgaagtgtattttgaaaattaatcgccaccctcttccaaattatagaatttttt

SEQ ID NO: 1009 - DNA, 559 bp, Homo sapiens
  misc_feature 499: n = A,T,C or G
tgcgagtggagtgtccgctgtgcccgggcctgcaccatgagcgtcccggccttcatcgacatcagtgaagaagatcaggctgctgagcttcgtgcttatctgaaatctaaaggagctgagatttcagaagagaactcggaaggtggacttcatgttgatttagctcaaattattgaagcctgtgatgtgtgtctgaaggaggatgataaagatgttgaaagtgtgatgaacagtgtggtatccctactcttgatcctggaaccagacaagcaagaagctttgattgaaagcctatgtgaaaagctggtcaaatttcgcgaaggtgaacgcccgtctctgagactgcagttgttaagcaaccttttccacgggatggataagaatactcctgtaagatacacagtgtattgcagccttattaaagtggcagcatcttgtggggccatccagtacatcccaactgagctggatcaagttagaaaatggatttctgactggnatctcaccactgaaaaaaagcacacccttttaagactactttatgaggcacttgtggatt

SEQ ID NO: 1010 - DNA, 330 bp, Homo sapiens
ccaccaatggtactgaacctacgagtacaccgactacggcggactaatcttcaactcctacatacttcccccattattcctagaaccaggcgacctgcgactccttgacgttgacaatcgagtagtactcccgattgaagcccccattcgtataataattacatcacaagacgtcttgcactcatgagctgtccccacattaggcttaaaaacagatgcaattcccggacgtctaaaccaaaccactttcaccgctacacgaccgggggtatactacggtcaatgctctgaaatctgtggagcaaaccacagtttcatgcccatcgtcct

SEQ ID NO: 1011 - DNA, 517 bp, Homo sapiens
aaaaaaacaacaacaacattttttcaacaatttcaacaatgacacaaaaattcacatggaaatggggaagatggtctgttttgacagaaactgacaggaatcaatcaaaacaatcgaattttgaattgagtaaagtgcaatttcattggatagctaaatatctttgtaagatagagattgttgaaaattctatttttgtttttctagtcctttcaccccaggactctaaattattggggtaaaaaacagccttgcaagaaaaaggggagctatttttgctttttatgttttttattgttaaacttgtatccctttcacaccattaggtgatgctttggacagaacagagtattttcatcttgtgtttccatcagaataactacaagccatactgaggcggcagcaggagcgaccaactgatcgcacacatgctttgtttggatatggagtgaacacaattatgtaccaaatttaacttggcaaactttctattgcctgtcccatgtgcatcttattt

SEQ ID NO: 1012 - DNA, 308 bp, Homo sapiens
aaacttggcattggctatcttcacacattcctcaagcgttgtgatgaatgtgttacacgtggcactaagcagagaagaggcttcattcatgttctctgcactaggagatgaatgattctcatcatggtgaacaaattcctgtatcgtatgaacttgctgcattaagaggtcacagtagaggcgaagttcagacattttggttttcagcgattcactggtttcacttatttctttttcttttttagtccttgtatcagtcaaacatgctttggagctccccagagcgaccagccacctctgtctttcag

SEQ ID NO: 1013 - DNA, 422 bp, Homo sapiens
ctgatttataatcttctaaaggaagaacagaccccccagaataagattacagttgttggggttggtgctgttggcatggcctgtgccatcagtatcttaatgaaggacttggcagatgaacttgctcttgttgatgtcatcgaagacaaattgaagggagagatgatggatctccaacatggcagccttttccttagaacaccaaagattgtctctggcaaagactataatgtaactgcaaactccaagctggtcattatcacggctggggcacgtcagcaagagggagaaagccgtcttaatttggtccagcgtaacgtgaacatctttaaattcatcattcctaatgttgtaaaatacagcccgaactgcaagttgcttattgtttcaaatccagtggatatcttgacctacgtggcttg

SEQ ID NO: 1014 - DNA, 344 bp, Homo sapiens
caagttcttgttatttccaaatagaatggacttggtctgttaagggctaaggagaagaggaagataaggttaaaagttgttaatgaccaaacattctaaaagaaatgcaaaaaaaaagtttattttcaagccttcgaactatttaaggaaagcaaaatcatttcctaaatgcatatcatttgtgagaatttctcattaatatcctgaatcattcatttcagctaaggcttcatgttgactcgatatgtcatctaggaaagtactatttcatggtccaaacctgttgccatagttggtaaggctttcctttaagtgtgaaatatttagatgaaattttctctttt

SEQ ID NO: 1015 - DNA, 464 bp, Homo sapiens
cctggggctgttgagacgggagatgtccccactgtgctgctcctggttttgtctcctctccaatccttgagcaccctgatatgcaacatggggggtaatcagaaggaggaggcagcctctgatgaggcaacggctgagggtgggggcagtgtgtaaggcaccttttgcggtcagcccggccacactccatcgccagagagaatgccaaagtgtagactgaatgaaattctgtaggcaaatggtaaatggtagctgggccagtagctatttgcatgggtggattatatcatgttaagggaattctttatctcagcagagggaacagaggaatatcttggctaaggtcatcctgccagtcaggagaagccaccctccagggaccacagactcaaagtggctgtggtggagacccaccgcctgggtagggggatgtcaagacactgagaggtttccatctgcagtgg

SEQ ID NO: 1016 - DNA, 506 bp, Homo sapiens
aaagttaaccacagcataatgaatcctcaacgtccagagttctacaaaaatccagcaaaacttacttttgctcattcatcagttctatgtcactccttagtttccctaaaaaaatatggctttataaaaagtagcttctataattcacaaaatgaagagttttattataatttgagtatcatctctgtatcaccgacagcacagctttagaaaattattgcttttcttattatcttattatttcaggtttcattacacatcgagtacccatgcaggactcactacattgtataataactatgatctatagtgataaaaatatagaagtatctttgattttaatcctaaaagcagggggaaaaagtcaccttatcttaatgttaacaaaatcaagagctacccctaatatatcgatcaaaccacttcttatggctttgcttatagttgctcatggtcctttcaaaatgatgtggtagctaccttcttttctgacaaaggattatttt

SEQ ID NO: 1017 - DNA, 408 bp, Homo sapiens
ccacagaaagttccataaacaagtgtactgtttaaccaattcccttctattaccacaacaatatgtacccagggttttatgtatacacttaagatttgggggaatgcaaaagggaagggtgactgtttagaatttccttggaaatgtctgtgcacattacaacgtcccacggagccaaattccttccaaactgatgagcaagctcttgattcttgagtcatgatgttattttcttctaatttttccgaaccgtctttgtttgactggacaccatattgacagcttcagatggtaggccaacatatactcctccatagtttctcctcttgtcatcttctgttacggattcttctgttacatctttggctgctcctgcagggccttggcccgcgcccgcgctggtggcgg

SEQ ID NO: 1018 - DNA, 576 bp, Homo sapiens
cctcctcagacactctcaagaggatggggagatgacatcacttgggtacaaacttatgaagaaggtctcttttatgctcaaaaaagtaagaagccattaatggttattcatcacctggaggattgtcaatactctcaagcactaaagaaagtatttgcccaaaatgaagaaatacaagaaatggctcagaataagttcatcatgctaaaccttatgcatgaaaccactgataagaatttatcacctgatgggcaatatgtgcctagaatcatgtttgtagacccttctttaacagttagagctgacatagctggaagatactctaacagattgtacacatatgagcctcgggatttacccctattgatagaaaacatgaagaaagcattaagacttattcagtcagagctataagaaatgatggaaaaaagccttcacttcaaagaagtcaaatttcatgaagaaaacctctggcacattgacaaatactaaatgtgcaagtatatagattttgtaatattactatttagtttttttaatgtgtttgcaatagtcttattaaaataaatgtttttt

SEQ ID NO: 1019 - DNA, 602 bp, Homo sapiens
cctgggactgatgcaagacagccagccagtcacctccgcctcccatgaacctcttggaaaacttctcctgtcccacttctgccaccctccagctccttgagagagccagagttgagaagaaaatgagcctgaagttgaaagggaaagttcttgcctgaaacagtgctgggaataagtccagaccatttccctcaagagccacctcttcactccttaagccagaggacaccacaaagacacagttaatggcctctcatgccactcctcaggtggcttgtgagggcagccagtgagggactgcaggatttcagggaagtagctcagatggcccactcagaacttctgtaagaatttgaggacaaggtcccgcagtcgcactctgagcatctcgtcattgtcgcagatgatatgggtcgagtcttcttcaatctggatgagcgtctcagcctcctggagcaggacgatatggcccttggctgtgtcctccaccttaatatcactgaagccatgctgctccagaagaaaagaaagaggtgggctgggcagactgcacatctgtgagatctgtaaatgacacttcacagactcgactgaactttcta

SEQ ID NO: 1020 - DNA, 420 bp, Homo sapiens
caaaaatccttgaaatacctgggcacagtggcacacctataatcctagcactttgggaggctgaggcaggcggatcacctgaggttgggagttccagaccagcctgactaacacggtgaaaccccatctctaatgaaaatacaaaaaattagctgggcgtggtggcgggcgcctgtagtcccagctactggggagctgaggcaggaaaatcacttgaactcgggaggtggaggttgcagtgaaccgagattgcaccactgcactccagcctggtgacagtgagactccatctcaaaaaaacaaaaacaaaaacaaaaacaaaaaaacactgacctgatatccaagctttatgtgaataaaaatgtaacttaccatcaaatagtcaataaaaaaaatatgaaaatggacaaggttattgaa

SEQ ID NO: 1021 - DNA, 508 bp, Homo sapiens
  misc_feature 442: n = A,T,C or G
ccaggagctaaacaatttgaggtcaagatgtggcgttaacaatgttcccacagatcacagaaacacaagtggacagcagaggcccttcttgcactagtacttctacctggatggggcctcagaggtctgactttccacaggagaagaaaatctttgagagccaattttactgctgggtgccgatgttttcctcaactgtctaaataaatcttcagctaataaacatttcaataaatctgttctggtgccttccattccttaaactatacagccagagaagatggaacatatgagcttggattctgtctctgtagcggatgcagggatataagtgagctgagttttacacattccaaaggggccactgatcaggtacttcgggatgcactccaagtgtcctggctaattaagataaaccaaagattagacggcatttctggcngggtgcagtggctcacgcctgtaatcccagcactttgggaggccgaggcaggtggattactaggtc

SEQ ID NO: 1022 - DNA, 166 bp, Homo sapiens
cggccgagctgacgcaaacatgcagatctttgtgaagaccctcactggcaaaaccatcacccttgaggtcgagcccagtgacaccattgagaatgtcaaagccaaaattcaagacaaggagggtatcccacctgaccagcagcgtctgatatttgccggcaaacag

SEQ ID NO: 1023 - DNA, 441 bp, Homo sapiens
  misc_feature 390, 391: n = A,T,C or G
tttttttttttttttttgttgtcccagatttattgaaaataatacagcactacagaaaaaattcaaacaggtccccgaggcgttttgaaattcatcccaactgtaggctgagtgacctgaaggttggacagactgccgaagtccaaaagcttcagcatttccttagtgtcaggatctacttcaataatctcctgatccaaggctgagacctcaggaacataattgtctctcctttctctctcctcctcctgcagcttgatggagatacctcttactgggcctctctgaattcgcttcatcagatgcgtgacataacctgctatcttgttgcggagctttttgctggggataatggcgatctcctcgcacacgcgcttgttcgtgtggaanntcgttgcccaggcgcgtgtagtacttttctatgatgacccgggccgcctt

SEQ ID NO: 1024 - DNA, 135 bp, Homo sapiens
cctgcccattgccggcaatggactttgagaaaacccatttcctggcacccaaaagttaaattactcttttcaaaacataccgatctccccaacacttgcaaaagtattacatgcaccattttcccaccattcttt

SEQ ID NO: 1025 - DNA, 340 bp, Homo sapiens
gtagaacactaattcataatcactctaattaattgtaatctgaataaagtgtaacaattgtgtagcctttttgtataaaatagacaaatagaaaatggtccaattagtttcctttttaatatgcttaaaataagcaggtggatctatttcatgtttttgatcaaaaactatttgggatatgtatgggtagggtaaatcagtaagaggtgttatttggaaccttgttttggacagtttaccagttgccttttatcccaaagttgttgtaacctgctgtgatacgatgcttcaagagaaaatgcggttataaaaaatggttcagaattaaacttttaattca

SEQ ID NO: 1026 - DNA, 234 bp, Homo sapiens; identical to SEQ ID NO: 302

SEQ ID NO: 1027 - DNA, 519 bp, Homo sapiens
ctgtgtagtaaagatgccttctggtgaatttgcacgtatatgccgagatctcagccatattggagatgctgttgtaatttcctgtgcaaaagacggagtgaaattttctgcaagtggagaacttggaaatggaaacattaaattgtcacagacaagtaatgtcgataaagaggaggaagctgttaccatagagatgaatgaaccagttcaactaacttttgcactgaggtacctgaacttctttacaaaagccactccactctcttcaacggtgacactcagtatgtctgcagatgtaccccttgttgtagagtataaaattgcggatatgggacacttaaaatactacttggctcccaagatcgaggatgaagaaggatcttaggcattcttaaaattcaagaaaataaaactaagctctttgagaactgcttctaagatgccagcatatactgaagtcttttctgtcaccaaatttgtacctctaagtacatatgtagatattgttttctgtaaata

SEQ ID NO: 1028 - DNA, 238 bp, Homo sapiens
ctgctaggagcccacctgtgttcttcctgaggggtgggggcaccctagtcactgcctagaggcacatggtcccccaccagcctacagcatggaaacacccaatgtctgctctagcctattcttaacccacaactgggatgggagctggggacaggagaaggggtcatggggccaggagcctattcaggctctacaaccagacttccctagagaggccccgtgccagttagtccaatgg

SEQ ID NO: 1029 - DNA, 351 bp, Homo sapiens
ccagaatgggctatgtgtcacagtcctcggggacagcagtgcgtttgtgtgtgtgctgtatgctcgtgtgtgtgctgtgctcgtgtgtgtgctgtgttcatgcgtgtgctgtgtgttgtgtgtgtgtagctgcggggatgcataaagtatgagtgctttttaggatgggaattgagatgtaagatttgggggtgagggtcgtgccaattacatttcatttgcatggattttggttttcatgctctgtcctcccctcctttggtcttactgggtccctctgactgctctgtgatttttagtgatggaaaagggagtgaggagccagtctgggttgttgctattttcggatgg

SEQ ID NO: 1030 - DNA, 525 bp, Homo sapiens
  misc_feature 517: n = A,T,C or G
aaaattgataataatgctgaattatcttaagtgagatgttaagcccactttgttcttttaatgtaatggagcttatgggtagaagaccatgtctactaattacaaaaaaaaaaaaaaaccatgcattgctgcttttcctaccacttccagtaagaaaatgggtgttttgaagaaatcatttgccttgtcctcacggaatctgattaagccctggcctcttgattgtatagagtcattgtgtatattccagttacctagatattcccttgagattttgatacaatttgagggaggcagaagtctgcagttgaagaaaaaaaataagtctgtttgtcatatttaagtagcctgtggctatttttatactgattttgatatcatgttcttttcatagtcgtattttgccaccgtaaacataaaaaaaaaaaagatttccaaaatgccgttttcagaacctgggttttaatagcagtattgaatttgtaagcttagtagttgcagaaattgaacactaggnggcactca

SEQ ID NO: 1031 - DNA, 485 bp, Homo sapiens
ccttggtgatacacctcggtctcaaaggtgatcaggtgcagctcctcagtcacaatcagggaagcatcacaattggctcggcccccattcccacatctctgctccctcagggtcaagtgtttgaattctgcagagaggctgccgttgttggattcttccatgttcatcacttttgtgtttgtgcccagaatgttaaatttccgggatcctctgagagctgcaacgtccccagagtctttgtcaatgcacactttaattttaagctgataattcaactcagggaatttgaccagcaacctgactttagtagtgaactggacgccggtcttgatgacgaggggccggtcaggatgcatgggcatgcagggctgccgctccaccacaaaggcacttttcattaagtttctaaacagctccacgattctctcctccagcatcggccggtgctgtacaatggggtcccctttgtaggaaactttttgctg

SEQ ID NO: 1032 - DNA, 326 bp, Homo sapiens
ccatacaaggtaattttgacaggttcctgggattaggacatgggcatcttgggaggccactactggcctaccacaactgggcagcaaaactattacaccctccggtataatagttttggtgtttcaatgactggggggaaaagggttggaattttttgctttggggtccctcttaaccttgtatttttaaggtctgggactcaccaaccctccccttccaaccagagaaactcactgcagtatctccttgaaagtctggtgacgtgtctgtctaagtgctggtgagaggcacaggaccaactgagggcctcacgcagtacccctgg

SEQ ID NO: 1033 - DNA, 345 bp, Homo sapiens
ccacacagactcaccaagccacagacttgtcttccacaagcacgttcttaccttagccacgaagtgaccaagccacacgtactaaaggttgaactcaaagatatgtacagggtattaaacaaataccaaggggaacagttaacttcaatacaaggtcaaaatcagcaacaagttctacaatccagtgctgatatcagatacaagcttcaaggacaatttcttttcgaaggcttattccagtttcgtgaggctagcatgaggtgtgtgcatttgccaggggcaaatttctattctcaattaacccatgcagcaaatgctacgcatctgctgagtccgtttagaagc

SEQ ID NO: 1034 - DNA, 345 bp, Homo sapiens
ctggtctttaattatgtggttccgaagcaaattccttgtatgggcatcaattggaggggttccatctttgaatacagaattcaggggagccaggagggtcaaccgctcacttccagagagatgattgccgaggccggcttgtctgaaaaggtcaatggctgtggacacatcagactctgcagccaattcaaatagtgtcttggctgagtctgggatgagtagctcatcaatgtagtggatcaccccgttggtggctaggatgtctttattggagatgatcgccttcccgttgatagtgagcatgtccccgctgcagcccacctccagtgtcgtgccctccagggt

SEQ ID NO: 1035 - DNA, 348 bp, Homo sapiens
aaccagccttcggagcgttctctgtcctacttctgactttacttgtggtgtgaccatgttcattataatctcaaaggagaaaaaaaaaccttgtaaaaaaagcaaaaatgacaacagaaaaacaatcttattccgagcattccagtaacttttttgtgtatgtacttagctgtactataagtagttggtttgtatgagatggttaaaaaggccaaagataaaaggtttctttttttttccttttttgtctatgaagttgctgtttattttttttggcctgtttgatgtatgtgtgaaacaatgttgtccaacaataaacaggaattttattttgctgagttgttctag

SEQ ID NO: 1036 - DNA, 534 bp, Homo sapiens
  misc_feature 485: n = A,T,C or G
ccaacatggtgaaaccccgtctccactaaaaatacaaaaattagccaggcatggtggcgggcacctgtaatcccagctactcaggaggctgaggcacgagaattgcttgaacccaggaggcagaggttacagtgagctgagatagcgtcatcgcactccagcctaggcaacaagagcaacactccatctcaaaaaagaaagaaagaaatgtaacctcagacaaaaccagcctagcttatttttatattttcatgatctataacataggaaatatttatgtaaatcacactggtgaaggttatatgtagcacttaaaaatatgaggcttgatttggtcagtgttttcagaggttaaaataataaattccactgacctgggcacattgtgaagtaagctataaaaattccaaataattatctctaaagcaaatcctttgttagttacatggctttacatattaattactctggaaagtttttgaacnctgtttagtagcagatctcctttcttgatagtttcttggtactgccagt

SEQ ID NO: 1037 - DNA, 530 bp, Homo sapiens
aaaacaaacttaactttatttcctcactttcacttaaaacttgattttataaaacacatgaaaaaacatttttaagagttctgtatcacagaacattaaacagtacaaatatccattgcttcataggttcaagttacataaattaaagtcaaataattggaaactgattcaatagggaaaactatacatgaaatgaaggtcaaaaggagctatacagcaatatttcattgtttatagattatgagttactttcaggaccttaacaaagattctgaatatttagacttcctttgttgtattttatacttaaatatctccctacctatactgagtcaaactacttgaccaaaacatctgatttaggaaagcatctagctttatagcacaagtttttccatctacagttactatcttcaaaggaatatacatcacaatgttgacaaaaaaacctcctggttccttttgaacaatgtgcaataaattcatgatgttaactccatggtaagtcaaataggtaccaaaaaaataaa

SEQ ID NO: 1038 - DNA, 235 bp, Homo sapiens
ctgagagcttcatgtccaccagattctgagaggtgtcagcagcactttttttttttatttgttgtttgttttccatgaggttatcggaccatgggctgagctcaggcactttctgtaggagactgttatttctgtaaagatggttatttaaccctcctccaccccatcacggtggccctgagggctgacccggaggccagtggagctgcctggtgtccacgggggagggccaagg

SEQ ID NO: 1039 - DNA, 440 bp, Homo sapiens
aaaaaacccacaaaatgctgattcagttcaaaattaatgcaaatgtttcaaaactgggtttctgatatttgtaaatgtgtttctttattagataagagtgtattaccattaaagtcattagtataatattgctttcaaaaagaaatggtggacaaaactataatccagcatcttttattgcattggaaagactggcaaagtcttttggatgggttgggagatgtggctggaaagtactttggaaaatatacaatcaagatatctcatggcatattaaaagaaaaatcttaatagcagtgttggcttttatttggattttttcatctcagttttttctgtggaatctccttcattggcattgttatttaatcataaacggggcagatgtctacttgttcagtttttcaaatctgttttcctgagtataaataagagtattt

SEQ ID NO: 1040 - DNA, 508 bp, Homo sapiens
ccaagatgaagaaagtcatgcatttacaggatgtagaagtgaagaacgccacacagtggaaggataagataaagagtcagcgaatgagaatcagcacggagttttcaaagctgcacaacttcctggttgaagaagaggacctgtttcttcagagattgaacaaagaagaagaagagacgaagaagaagctgaatgagaacacgttaaaactcaatcaaactatcgcttcattgaagaagctcatcttagaggtgggggagaagagccaggctcccaccctggagctgcttcagaatccaaaagaagtgttgaccaggagtgagatccaggatgtgaactattcccttgaagctgtgaaggtgaagacagtgtgccagataccattgatgaaggaaatgctaaagcgattccaagtggctgtaaacctagctgaagacacagctcatcccaaactcgtcttctcccaggaagggagatatgtgaaaaatacagcatcagccagttcttg

SEQ ID NO: 1041 - DNA, 212 bp, Homo sapiens
ccattctctgcaaccatcagcgagcaacccccagtacgttcgagaagtcgatgcagaatctccagacgaagatccaggcaaagaaggagcaggtggctgaggccagggcagagctgaggagggcgagggctgagcacaaagcccaaggggatggcaagtccaggagtgtcctggagaagaagaggcggctcctggagaagctgcaggagcag

SEQ ID NO: 1042 - DNA, 402 bp, Homo sapiens
aaagcctttttttaggccacattgacagtggtgggcggggagaagatagggaacactcatccctggtcgtctatcccagtgtgtgtttaacattcacagcccagaaccacagatgtgtctgggagagcctggcaaggcattcctcatcaccatcgtgtttgcaaaggttaaaacaaaaacaaaaaaccacaaaaataaaaaacaaaaaaaacaaaaaacccaagaaaaaaaaaaagagtcagcccttggcttctgcttcaaaccctcaagaggggaagcaactccgtgtgcctggggttcccgagggagctgctggctgacctgggcccacagagcctggctttggtccccagcattgcagtatggtgtggtgtttgtaggctgtggggtctggctgtgtgg

SEQ ID NO: 1043 - DNA, 150 bp, Homo sapiens
aaaatcaacaattatggttttcctacacaaaaccccaaccctcccacccaaaaaccctaggtgctacagttccatggcttgccagtaagtagtgtctatgttgtcaaggtctatctttgttccagtagcttgcttctactgcacttttct

SEQ ID NO: 1044 - DNA, 467 bp, Homo sapiens
ccaattgaaacaaacagttctgagaccgttcttccaccactgattaagagtggggtggcaggtattagggataatattcatttagccttctgagctttctgggcagacttggtgaccttgccagctccagcagccttcttgtccactgctttgatgacacccaccgcaactgtctgtctcatatcacgaacagcaaagcgacccaaaggtggatagtctgagaagctctcaacacacatgggcttgccaggaaccatatcaacaatggcagcatcaccagacttcaagaatttagggccatcttccagctttttaccagaacggcgatcaatcttttccttcagctcaacaaacttgcatgcaatgtgagccgtgtggcaatccaatacaggggcatagccggcgcttatttggcctggatggttcaggataatcacctgagcagtgaagccagttgggggccagtg

SEQ ID NO: 1045 - DNA, 543 bp, Homo sapiens
ctgccttggagtcgccctcagcagagatgatggccgcctttttctgttgctcagccttttccaccacaaatctggccctctctgcttcctgctgagccacctgtttggcttccaccgcttctgtgaactccttcccgaaggtcagatgtgtcaaggacacgtcatccaggatgagcccaaaggtggcggctcgctctgtaaggtcgtcgctcacctgcctggagaccagctctctctgggtgattagttctccagcatcaaagcgagccaccactgacttgaggatctcagttgtgatggacggcagcacacgctcatcatagtcctctccgatgctggtgaagatgcgaggaagctggctggcgacaggccggaagaggatgcgcagtgtgatgttgacattctgtaaatctttgctaccagtgatgactggcacattacgtggtcgagaacggcagtcaaagataattggtttctgtacccacgggatgagaaaatgagtcccttcccctaccacaatgtcctgcactccacggaatcggt

SEQ ID NO: 1046 - DNA, 245 bp, Homo sapiens
cctctttttaccagctccgaggtgattttcatattgaattgcaaattcgaagaagcagcttcaaacctgccggggcttctcccgccttttttcccggcggcgggagaagtagattgaagccagttgattagggtgcttagctgttaactaagtgtttgtgggtttaagtcccattggtctagtaagggcttagcttaattaaagtggctgatttgcgttcagttgatgcagagtggggttttgca

SEQ ID NO: 1047 - DNA, 471 bp, Homo sapiens
ctgaaggaacggtgcagaatcgaaccacatactggtctgctcttgctttcagtacagaagagaagcatgtccttccaaggaatcagacaacctgtgaccgtcactgagctagtagattctggtatattgagaccgtccactgtcaatgaactggaatctggtcagatttcttatgacgaggttggtgagagaattaaggacttcctccagggttcaagctgcatagcaggcatatacaatgagaccacaaaacagaagcttggcatttatgaggccgtgaaaattggcttagtccgacctggtactgctctggagttgctggaagcccaagcagctactggctttatagtggatcctgttagcaacttgaggttaccagtggaggaagcctacaagagaggtctggtgggcattgagttcaaagagaagctcctgtctgcagaacgagctgtcactgggtataatgatcct

SEQ ID NO: 1048 - DNA, 410 bp, Homo sapiens
ccagcgagcacatgaagcggttcttcgtgaactttgtggttgggcaggatccgggctcagacgtcgccttccacttcaatccgcggtttgacggctgggacaaggtggtcttcaacacgttgcagggcgggaagtggggcagcgaggagaggaagaggagcatgcccttcaaaaagggtgccgcctttgagctggtcttcatagtcctggctgagcactacaaggtggtggtaaatggaaatcccttctatgagtacgggcaccggcttcccctacagatggtcacccacctgcaagtggatggggatctgcaacttcaatcaatcaacttcatcggaggccagcccctccggccccagggacccccgatgatgccaccttaccctggtcccggacattgccatcaacag

SEQ ID NO: 1049 - DNA, 274 bp, Homo sapiens
aaaattgcaatgacttaaataatgaggttgttaattagagtcagagcctgttcacatattgtgatcaggtagcaatgacatgtaccacttaaattattttatcgtcgatttggtagttcgattttaactactcaatgaaaacagccatgaatatcttttcttaaagagagttttgaaaatgatcacttacctaaaacttgaaagctatgaattagttatccatactctcatgacaattttgttggtgaacaacaaaaaagagatctatttcttt

SEQ ID NO: 1050 - DNA, 511 bp, Homo sapiens
ccttaggactcgagacattttatgacctctcccaataggggcagaggtgagcacccctggtgaaaagttaagactcagtgagtataaatacgccaagaggagctgtggcttctttcactggtgtcctctgtctgcactaagatcccagaagggaggcttgccattattttccttccgatgttcacgttcacagcagggaatgccctgaaagccattatcgccatggatacagcaggaatgatcctgggatggaaattttttgatcatgcggcacatcttgggggagctctttttggaatatggtatgttacttacggtcatgaactgatttggaagaacagggagccgctagtgaaaatctggcatgaaataaggactaatggccccaaaaaaggaggtggctctaagtaaaactgggattggacagtagcggtgcatctggtccttgccgcctgagagccccaggagacatcggctagagtgaccatggctatgctcccgtctggaagat

SEQ ID NO: 1051 - DNA, 264 bp, Homo sapiens
gtggagcaggagcctctacacagcctctggctcttaggtcccagtcatgtttgcaccccctcaaaggggcaggaccagcccttcctttcagtgtccataccaggggccttccatgtgctgatgggtgatgtgactgtggtcagcaggcttgggaagtgctgctgctgtagcttgagttgggctggggtcttggtaggacgctgatctcagaagtccccaaagttcactgtgtaggtctctactgttgtgaaggggaatgcctgg

SEQ ID NO: 1052 - DNA, 409 bp, Homo sapiens
aaactacctcaaaacactttcccatgagtgtgatccacattgttaggtgctgacctagacagagatgaactgaggtccttgttttgttttgttcataatacaaaggtgctaattaatagtatttcagatacttgaagaatgttgatggtgctagaagaatttgagaagaaatactcctgtattgagttgtatcgtgtggtgtattttttaaaaaatttgatttagcattcatattttccatcttattcccaattaaaagtatgcagattatttgcccaaatcttcttcagattcagcatttgttctttgccagtctcattttcatcttcttccatggttccacagaagctttgtttcttgggcaagcagaaaaattaaattgtacctattttgtatatgtgagatgttt

SEQ ID NO: 1053 - DNA, 345 bp, Homo sapiens
ccaatgtggttggtcttcagcttgcagttagccaggttccataccttgaccagcttgtcccagccacaggagacgatgatagggttgctgctgttgggcgagaagcggacacaagacacccactctgagtggctctcatcctggacagtgtatttgcacacacccagggtattccatagcttgatggttttatctcgagatccggagacaatctgccggttgtcagaggagaaggccacactcagcacatccttggtatggcccacaaatcgcctcgtggtggtgcccgttgtgagatcccagaggcgcagggttccatcccaggagcctgagagggcaaactgg

SEQ ID NO: 1054 - DNA, 481 bp, Homo sapiens
aaacctaagcaagaaaatgaactttgaactttcttaatttgggtatctattatgaataccttcacttaagtatttatgaatttagatatgaaaggtaaaactaaccactatccaaattaatatacagttcatttccagaaccctagtttcttccatgtgctcactcgcattcagtattacaacccccaaagataaacaccttactgactgccttctccataaatttgcctgttcttgaacgttatatacgtatacttttttgtatctgttttctttcagtgaagattatgtctgtattatttactcatgttgggtgtagttgtttttttcatcgtcgtataatactccattgtgtgaatgtataaagtatatcctttattatttattgtagataagcctttgggttttcagttttttactaacgggaacattcttgtgcatgtcttagtagacttaggcactcattgctgttgtgtgtgca

SEQ ID NO: 1055 - DNA, 164 bp, Homo sapiens
aaatgtttacgtcgacaaaaccagttagagtaacctacaccacatgcactatacagtagtaagcacaaaattccacagaatgaagcatcacaaagttctgctcagggtggctattccatctaggtgaaatagctgggattttcaattgcctttttcatttgttt

SEQ ID NO: 1056 - DNA, 112 bp, Homo sapiens
ctgttacttcacagctctgacctcagttttctcatctctaactaggtcaccggcacttccctcagggtttgtgagagttaaatgaagtcaagtgcggaacacccagcacagg

SEQ ID NO: 1057 - DNA, 503 bp, Homo sapiens
  misc_feature 366: n = A,T,C or G
ctgtgctcctggatggttttaccacaagtccaattgctatggttacttcaggaagctgaggaactggtctgatgccgagctcgagtgtcagtcttacggaaacggagcccacctggcatctatcctgagtttaaaggaagccagcaccatagcagagtacataagtggctatcagagaagccagccgatatggattggcctgcacgacccacagaagaggcagcagtggcagtggattgatggggccatgtatctgtacagatcctggtctggcaagtccatgggtgggaacaagcactgtgctgagatgagctccaataacaactttttaacttggagcagcaacgaatgcaacaagcgccaacncttcctgtgcaagtaccgaccatagagcaagaatcaagattctgctaactcctgcacagccccgtcctcttcctttctgctagcctggctaaatctgctcattatttcagaggggaaacctagcaaactaagagtga

SEQ ID NO: 1058 - DNA, 474 bp, Homo sapiens
ccacagaagttgctgctgacgctctgggtgaagaatggaagggttatgtggtccgaatcagtggtgggaacgacaaacaaggtttccccatgaagcagggtgtcttgacccatggccgtgtccgcctgctactgagtaaggggcattcctgttacagaccaaggagaactggagaaagaaagagaaaatcagttcgtggttgcattgtggatgcaaatctgagcgttctcaacttggttattgtaaaaaaaggagagaaggatattcctggactgactgatactacagtgcctcgccgcctgggccccaaaagagctagcagaatccgcaaacttttcaatctctctaaagaagatgatgtccgccagtatgttgtaagaaagcccttaaataaagaaggtaagaaacctaggaccaaagcacccaagattcagcgtcttgttactccacgtgtcctgcagcacaaacggcggc

SEQ ID NO: 1059 - DNA, 321 bp, Homo sapiens
gctggctagtgtccccaagatcctgagggaactggtgcctgagaacctcatacgcctgatgtcctcggaggagtggaaaaagagcatccttctagcctatgacaagcataaggacaagacagtggaggaggccaaggtggccttcctgaagtggatctgccggtggcccaccttcggatccgccttcttcgaggtgaagcaaacctcggagccttcctacccggacgtcatcctcatcgccatcaaccgacatggggttctgctcatccaccccaagaccaaggacctgctcaccacctatcccttcaccaagatctccag

SEQ ID NO: 1060 - DNA, 503 bp, Homo sapiens
  misc_feature 408, 410, 411: n = A,T,C or G
aaatggagtccacagactaaaggtcatgttccgagactgaagctttcaaatgaccctagttccaatatagacactttcttcagtttatcagtagcttttaaaagaaattcagaaactaagcggttggagaggagcattggaaatagagggggatgctatgagatgggggttgggagcagagaagaaactgcaggagggcaaagtgtaactagcaatataccttctgtgatgctccagaaacacatgtctgctaagattaacttgattggagtttcttatgaaacaggctgatcatcaagatttttaactcaggtttcagtgaaaaaattggaaacttttacaagaaagatttgagaagtagaaggcaggcagcaaattttccagatattatgcttgcatttcaaattncnngtttcaggcttttcaagtaggcatgcacattcccaaagccatgatatttggctaaatacacaaggaccccagtcgcacaccgtccatctcgc

SEQ ID NO: 1061 - DNA, 436 bp, Homo sapiens
ctgactgtcctctccagaaggctcttctgagctgagcaggagaccccagggccacagccgagccccaacctagacacggtctgagctccaaccttggctggctatacttcaagggcgggtagggccggcatggggctggagggagtcagcccactattgcagattccacacaaagaaggagggggcttgggtggtagcactggacatccatcccatgtgcctgggagtcttggggttggagccacagagaaggttacatcggggtgctgcggaccttgccttcctcctcgggcacattctcataggcattctcatgctcactggacctgaaactggccgccatcgaagagtaccttccatctgttcccaccaggactccatctgccttgtttccgacggtcaggatcatgtgtgcaggctccggctcctacctgcc

SEQ ID NO: 1062 - DNA, 544 bp, Homo sapiens
  misc_feature 442, 488, 511, 512: n = A,T,C or G
ctgtgtgtccatcaacacacaaattcgtaaaaaacacacatggcctcgccatcgtgggtaaaatcggccccacagcacgtctgcaccagcgggccgttactcccatgccgttcttctgtgtaatattaagaactgaatgtgaagtttatagctagcctgggtgtaccttttaagaattttgtaaaccgtttgtctgtcttttgttactgttttatggtgccaagtatcctacgttacaacaataatatcatgggagaaatagaaatagcctagtttgcttccaatagaaactgcttttaacatgggctgtatataaaaatattaaagagaaacaaaactgtacatttcctcattgctccgctacagacaacccatgtcataaccttgttgcaaatatttttctcctatagcagtaagtacagcattagaaggtgattagagngtctgttgatgaaacacaaatgtatgttttattgattttactttanaacactacagatttcctggaccnngtgaaggcattagcttgggtgtttgtgtggga

SEQ ID NO: 1063 - DNA, 379 bp, Homo sapiens
ctgcagcctgggactgaccgggaggctctgattgtttacccaccacaggtaggttgcgtcctgagtctcaggttcacaggtgaaggccacagcatccttgtcctccacggggttggagttgttgctggagatggagggcttgggcagctccgggtatacatggaactgtccggttgcttcttcattcacaagatctgactttatgacttgtagggtatagaatcctgtgtcattctgggtgacgttctggatcagcagggatgcattggggtatattgtctctcgaccactgtatgcgggccctggggtagcttgttgagttcctattacatatcctacaattagactgttgccatccactctttcgcctttgtaccag

SEQ ID NO: 1064 - DNA, 240 bp, Homo sapiens
ctggtcctgcagacaggtgctcttgtcctgagtgacaacggcatctgctgtatcgatgagttcgacaagatgaatgaaagtacaagatcggtattgcatgaagtcatggaacagcagactctgtccattgtaaaggctgggatcatctgtcagctcaatgcgcgcacctctgtcctggcagcagcaaatcccattgagtctcagtggaatcctaaaaaaacaaccattgaaaacatccag

SEQ ID NO: 1065 - DNA, 533 bp, Homo sapiens
aaaaaaggcatttggagaaactggtagatgtcttcaacatatagttcaaataaattagttgtatgtgtactactgaatcctctttcaacctctcttgcattccaaataaaatcttagtgcaaacatcaaagttgctggtcactccaaaagactgctaaactcataatagaatacaagatctgaattactgtgtattaagtaggaaaacccaagaataccagttactgcaaaattcatttaggcacatttaatagtccactctaagcattttttctaagtctctcacattaatgactaaagcctgtttacagtactaaaattctatcattcaagcatcaatgattacatttcagaaaaaggaaattcatttcagtaatagcattactgctatatcctaaaaaaaggagagaaaataaagaatcataattaacaaaaccagtatccataataggatacacagggaaaaacattttaggagaaaaaaaagtgtgctttacttgccacagcaggaattatataatgtaaacaccata

SEQ ID NO: 1066 - DNA, 496 bp, Homo sapiens
ctgatgtttgaaatatctgtctacatttaattagatgtgttgtatttaccaaggaggcacaaatatgtagttctgtagattttaatactaacttttccagtaagaaaaataataccaggtgatttcaaaaagggcagtgatctataaacactcaaaatgcatctttgaacaggggagcagaaatagctaatttaatgaaaacaaaccttaagcactttacttggcttctaataagcatcccaagaaaaggtacctgagaggggttgacaagtacactgtgtctagaacagccaagatgttgccaaagttttatgctttgaatttcctaaatatatagctagcagaaacatatgccagaaatctactgatgctaggaaaatatttttgtcagcattttgtaaaatctctaactttcaaccaatatttctgttcataaatcttccagtgaaaatgtctgaaatatattacatgtaacaatgaagcaagattaatttta

SEQ ID NO: 1067 - DNA, 517 bp, Homo sapiens
  misc_feature 456, 486, 507: n = A,T,C or G
gcaggtccaaggatatcaaaccttaaactcagaacatggcaggtgagtaaaagttgaccctatttttcaaataaaagatcagtgttctcaaaacttacatatgtagtcttcttaaacagctccctcctccctccaaacaaactaccttgctggtccagcctgaacaacatgcacaaagactttggctcccctagaacaagccattgagccttcctcttgagataggggcatcaagaataaggattcacatgtttattcacaactcaggctcctcaaggggctgggatctccccaattagactcctttgtttcactatgcccacaatctcagaggtgtttgaaattgtctgtactagggaagaaaggattttcaaaaatagccagtcacacagaacagctctggaccaagccattacccaatcccggatgggaagttgcttcacgtttctcttaagntgttacgcagcattgccatggcagcaaaangaggttaaccattaaggaagnacctgttcaa

SEQ ID NO: 1068 - DNA, 112 bp, Homo sapiens
  misc_feature 90, 106: n = A,T,C or G
ctgctggagtcggaactgctgcctttgtttggcggccttgtttcttaaatcagttccctcttaggatttattacactaaaaaaaaattantttttgaaaagaaatnggagaa

SEQ ID NO: 1069 - DNA, 513 bp, Homo sapiens
ccttaggaatcatacagagagaacttaaataaggctgacccttgggcagatttgtagcccaggttagtataagaaaggtagtcaagaaatctcaagccatgaatttagtttcaagttttctggatgagtaggactcctaagtgcctggcagaagcaaatataaatcctccccagaggaagacagcttcatctttgcccgcagaggatctccataaataattgctcaagggcagccggcagcagtcagtcaaagctggagtcaatccaccaggtgacagggcatcccaaggaaaaactaggagggaaaaaagcctagtaacagaccctcacacccctcagagattagttatgagatatgaattataaagcaagtatgcttactataggtaaagaaataaaagataaaccaggaaatatctgcaaggaataggaaactattaaaagtggcatagcaaattttatgaggaacaaaactgaattgtaagaaatgaaaacacagtaattgaacaattt

SEQ ID NO: 1070 - DNA, 74 bp, Homo sapiens
cctgctacttataggcattacttcatttttccttatgaagggtactataccaacacagactttatagtatgttt

SEQ ID NO: 1071 - DNA, 509 bp, Homo sapiens
ccttcttatttagattccttttgatgtccttccattttcagatatacagttgcttttttcctctgggttttgggaagggcacctctcacatgacgatcttatggcctgcttctggggaaaaggatggggaaatgtcagagagtccttgcatatatcatctctcaaaactcttaatcttaaatattcagtatgtcaaggtgccatattttggggtagcatgtcctgagctccatcaacattaatgtaaaaatatttagcctaatgcctggcacatatcaagagcttaagaaatgctgactctaaaattatgacatctaggaagatgtggggcagaattgtaaacttacctgctaaattacctatgagctgcccaccattcgttaattatggcaataataatgggtttatcatgctgtatcctcactcttgcaagcagtgttccttgtgcttagcagtaaatgttgcctaatttggggcatgctggtgtgtctgcagactgttcttgtatg

SEQ ID NO: 1072 - DNA, 563 bp, Homo sapiens
ctgtcactcgaagaataccattcacatctatctcaaaggtgacttcaatctgtgggaccccacgaggagcaggaggaattccagtcagatcaaatgtacccagaagatgattgtcttttgtcaggggtctttcaccttcatagaccttgattgtaacagttggttgattatcagaagctgtagaaaagatctgagacttcttggtaggcaccactgtgttccttggaatcagtttggtcatgacacctcccacagtttcaataccaagtgtaaggggacatacatcaagcagtaccaggtcacctgtatcttgatcaccagagagcacaccagcctggacagcagcaccatacgctacagcttcatctgggtttatgccacgggatggttccttgccattgaagaactctttaaccagttgctgaatctttggaattcgagtcgagccaccaacaagaacaatttcatcaatatcagacttcttcaaatcagaatcttccaacactttctggacgggcttcatagtagaccggaacagatccatgttgagctcttcaaatttg

SEQ ID NO: 1073 - DNA, 410 bp, Homo sapiens
  misc_feature 321: n = A,T,C or G
caaaaccccactctgcatcaactgaacgcaaatcagccactttaattaagctaagcccttactagaccaatgggacttaaacccacaaacacttagttaacagctaagcaccctaatcaactggcttcaatctacttctcccgccgccgggaaaaaaggcgggagaagccccggcaggtttgaagctgcttcttcgaatttgcaattcaatatgaaaatcacctcggagctggtaaaaagaggttttgtacaagctttttttttttttttttttttttttttggaaaaaaaaatgggtagtgtatattttgcaggtttaanacaactcaggacaataaaaacaatggactttacatgtgtatatatatagctctcttaggcaccataatcagtatgagccaacaatattt

SEQ ID NO: 1074 - DNA, 499 bp, Homo sapiens
gtggaagcaggtgtgagagggtccagcagaaggaaacatggctgccaaagtgtttgagtccattggcaagtttggcctggccttagctgttgcaggaggcgtggtgaactctgccttatataatgtggatgctgggcacagagctgtcatctttgaccgattccgtggagtgcaggacattgtggtaggggaagggactcattttctcatcccgtgggtacagaaaccaattatctttgactgccgttctcgaccacgtaatgtgccagtcatcactggtagcaaagatttacagaatgtcaacatcacactgcgcatcctcttccggcctgtcgccagccagcttcctcgcatcttcaccagcatcggagaggactatgatgagcgtgtgctgccgtccatcacaactgagatcctcaagtcagtggtggctcgctttgatgctggagaactaatcacccagagagagctggtctccaggcaggtgagcgacgacctt

SEQ ID NO: 1075 - DNA, 448 bp, Homo sapiens
ccagtttggagaacgcgctgacatactgctcggccacagtcagtgaagctgctgcatctccattatgttgtgtcagagctgcagccaggattcgaatagcttcagctttagccttggccttcgccagaactgcactggcctctcctgctgcctgatttatctgttcagccttttctgcttcggaggccaggatctgggcctgtttcttcccttctgccacattgatggccgactctcgggtcccctcagactctagaactgtggcccgtttccgccgctctgcctccacctgcatctgcatagactctttcacccggggtggcacatggatatccttgatctcataacggaggcagcggataccccagcagtcagcagcttggttgatggcatccacaatgctggcattcagggactcccgttcccggaagactttgtccagagagag

SEQ ID NO: 1076 - DNA, 217 bp, Homo sapiens
ctgtggatttcaaaacacagtgtattctagatcatctaagatccatgctgatttttattgcacaagaattaggtttgaactcttgagctggaacctcagcaaactagagtatatattgttcagtatttctttggaaacatttcattaatgtacttgtcttacagaaatttctgaactttagtaaaaaaaataaagttaaacttttaaaactcaaaaa

SEQ ID NO: 1077 - DNA, 254 bp, Homo sapiens
ctgcctatttccacatctttcaatccatctggctccttaaataggggaaaaagcccttatttggtggagaagcatttccaaaatgaagttacaggttctattaaaacttactgtcacatcaactgttaaaatagggccttttgtgttttgttatttcaccttaatatcaccagaattcctgtaattccacaattgtgattttactatgtagaagataattcagttctagtctattgctttagatgtaaaaacag

SEQ ID NO: 1078 - DNA, 354 bp, Homo sapiens
ctgtccctggatagtgccacctttgcctctccccaggattttgggcttgttttgcaaacactcaaagagtacaacctagccctgaaaagactgagcttccatgacatgaatctcgctgactgtcagagcgaggtgctctttttgctacagaatctgactctgcaagagattaccttctccttctgccgtctgtttgagaagcgcccagcccaatttctgcctgagatggttgctgctatgaagggcaactccacactgaagggcctccggctgccagggaaccgcctggggaatgctggcctgctggccttggcagatgttttctcagaggattcatcctcctctctctgtcag

SEQ ID NO: 1079 - DNA, 563 bp, Homo sapiens
  misc_feature 472: n = A,T,C or G
gcacagagctgtcatctttgaccgattccgtggagtgcaggacattgtggtaggggaagggactcattttctcatcccgtgggtacagaaaccaattatctttgactgccgttctcgaccacgtaatgtgccagtcatcactggtagcaaagatttacagaatgtcaacatcacactgcgcatcctcttccggcctgtcgccagccagcttcctcgcatcttcaccagcatcggagaggactatgatgagcgtgtgctgccgtccatcacaactgagatcctcaagtcagtggtggctcgctttgatgctggagaactaatcacccagagagagctggtctccaggcaggtgagcgacgaccttacagagcgagccgccacctttgggctcatcctggatgacgtgtccttgacacatctgaccttcgggaaggagttcacagaagcggtggaagccaaacaggtggctcancaggaagcagagagggccagatttgtggtggaaaaggctgagcaacagaaaaaggcggccatcatctctgctgagggcgactccaaggcag

SEQ ID NO: 1080 - DNA, 506 bp, Homo sapiens
  misc_feature 482: n = A,T,C or G
aaaacttggagaagctggctgggcgcggtggctcacgcctgtaatcccagcactttgagagaccgaggcgggcggatcacgaggtcaggagatcgagaccatcctggctaacacggtgaaaccccatctctactaaaaatacaaaaaattagctgggcgtggtggcaggcgcctgtggtcccagctactcgggaggctgaggcaggagaatagtgtgaacccgggaggcggagcttgcagtgagccaagatagtgccactgcacttcagcctgggtgacagagtgagaccctgtctcaaaaaaaaaaaaaaaaatcctggagaagccagaacaatatacaaacaagtatgtggaggcagatttgctttattccaagaggctgtttgagtgtgtgtctgcctaagcctccttatagcctatttttctacttgctgagagagtaatattaaaggaacagtgagggagtggaaggagagccttanttagagcgttcccatttctggcct

SEQ ID NO: 1081 - DNA, 462 bp, Homo sapiens
aaatttaagatagtttgtaagaactgtacaaaaaaatgcttctggagatttctttggcagaaatgcctttcatctataatttcatggagaactgctttaattagcctaggtgaaaagtagtcctagcagtgtaaatatgtataattagagttttctaatttcactgtgagatctctaacttttgagtggcaaacagatcaagtcttttgctcatagacttttctgtggggttattaaaatgcaaaagctttattttttttaataatgccatactccattagtgtcagatgatggtatggaatttgttcccttgctttcccccactgttactgcttcagtttatagattgccagcagagttcagaaatagagcagggatttacccgttctttgcttggacatcccattttcttttgtccagacccatgttggcaatcatgtatgaactgtgttatacttctca

SEQ ID NO: 1082 - DNA, 279 bp, Homo sapiens
aaataccatcctttgtctccgttaaaagattttcatccatttattcaaaaaccttttaagttcaactgtccaatttaagacagagtgaagacatttttgagtatctgaactaagcattgtcttgactgaaacgaagtaagaactcaatgagagtccttgtgggcctcccagtcatgcctttccgtagatagggaacttcatctttgttggtcatcacgcctgctatgtctaaatgtgcccacttaggatgagttacgaattctttcaggaatgctgcag

SEQ ID NO: 1083 - DNA, 328 bp, Homo sapiens
gtggaaagtccaacagatgccccactcacaagatagggccctccaatcagtcttctggctccctttcactcatagtaactggttgctcttcctattggtcatagataaatgacacctgcacaattctccgagtgctttcaagcaacttcgggaggcagtgactaagaccctttccttgcccccagcttcctatgtcccagggctgcctgtggcacctggactgctgctgcccctgggtcccgtacattccagggcaacaatggaggaagggcaggcaacgcatgaggaattaacagtctttattgggctcagaccaggagtccgtggg

SEQ ID NO: 1084 - DNA, 458 bp, Homo sapiens
  misc_feature 415: n = A,T,C or G
ttttttttttttttttccattcctagggggaatgggccccaaggttttgtttttttatttcgtttttggggtacaggtggtgtttggttacatggatgagttctttagtgatttctgcgactttagcgcacccatcacccgagcagtgtacactgtacccaatatgtagtctttcatccctcaccccactccaagatttagttctgccagacgatacatgttgccttcacttctttttagtttatttgcctggacccatctaagtcatacttaaaactctataaagcattttttttctttgaaatggtctcagctccttcttgatcctctccattttccacccaatctcctctatccctctccctttactgcctgaaatcggctgtagatgtagcagtttctggaggaaatgaanatttgtggtggttctttccagtcaccaggttgtgaaagtctta

SEQ ID NO: 1085 - DNA, 581 bp, Homo sapiens
  misc_feature 550: n = A,T,C or G
ctgcaaggattcagcaccagttatgtttgaatgaaccctccttttctctgagattctggtccctggaaatccctttctgctagtggtgagcatgtaagtgttaagtttttaatctgggagcagggcataggaagaaaatgtcagtagtgctaatgcattttgcactagaacgcttcgggaaaatattcatgcttgccatctgttcatttctaaatttatattcataaagttacagtttgatacaggaattattaggagtaattcttttctgtttctgtttataatgaagaacactgtagctacattttcagaagttaacatcaagccatcaaacctgggtatagtgcagaaaacgtggcacacactgaccacacattaggctgtgtcaccattgtgtggtgtacctgctggaagaattctagcatgctacttggggacataatttcagtgggaaatatgccactgaccgatttttttttcctctttgcagtggggctaggacagttgattcaacaaagtatttttttcttttttctcagtcctaatttgnacaggtcaaagatgtgttcaggcattccagg

SEQ ID NO: 1086 - DNA, 127 bp, Homo sapiens
aaaaacacacctcaccaagctcagccaccagcttaaaaaggactggacaatacttttaccactttcccttctcagaaatcaggcctgtcctcagaatgttacaaggtacagcccatttaagctcttt

SEQ ID NO: 1087 - DNA, 453 bp, Homo sapiens
aaaggttaatttgtagaacaaatgttttaactatactttttttctactctatactccccagttacaatatttacaaagggctgaagtctatataaaaaaatgatctttggctgggcatggtggctcatgcctgtaatcccagcactttgggaggtcgaggcaggcggatcacgaggttaggagtttgagaccagcctgaccaacatgaagaaaccctgtctctactaaaaatacaaaattagccaggcatggaggcaggcgcctgtaatcccaactactcgggaggctgaggcaggagaatcgcttgaacccgggaggcggaggttgcggtgagttgagattgtgccattgcactccagcctgggtgacaaagcgagtctcaaaaaaaaaaaaacatcttttactttcccccatccctcattttagtcaaacttctcccacctcatttctgcc

SEQ ID NO: 1088 - DNA, 321 bp, Homo sapiens
ccagcggctggtaaggagccagggcttccaggtaggagaagtctggttccgtgaatatgacggtattgagactagattttccccagagctccatgaagtggaccacgtccccgaagcggagggaagggtgcccggtgaacaccacacagggctgtctaaagtcgttgctgaagtctccgtggatgctggggtagtgcttcagcttattggtctgaatgagctctgcatgaggaaaaggtggttctggaagatacaccttactctgtttgttgtgacaaagccactcagcaaagatctgggaaaactccagtgaactgttgg

SEQ ID NO: 1089 - DNA, 409 bp, Homo sapiens
cctgtggtgtaggggactgaattttttttttaacttctattccattttaattgtaggatatctttgtccatatacccaggtgtcctgatttgaatgtactatttgatcctcattgtgttcaggcaaaaaataggaaatgagtaattttgagtttgaaatctctcccagaagacaaactacttcagtgagtaaaagctttgacattttatgttttattcataaagggggttaattatttgctacaaagaagcacgatctattttcatcatcgatttgaaaatatctgtaactcctatagatcctataggcagagagttttcctttctgactttttccctttgctttcgtgtgaccacatgttttctgtaccagtcactggggaaagaagtgagtttatctcgtttgtttt

SEQ ID NO: 1090 - DNA, 281 bp, Homo sapiens
aaactcaagactggctccaggagagaggaggacggacactaggttgaggggccaggccacactcactctggaccacctgttgttcccgggtcaagttcccagggtcacaccagcctgcctctgcaggacaagaggaccaagctgcccttgagtggacactgtgaggctggggctcgtggtagctcttcacatggaccaaacgggaaaatcaggaaagctggtagtgcctggagcttcactcccagccagggcagcacctctggcctctaaggagaaaggcc

SEQ ID NO: 1091 - DNA, 479 bp, Homo sapiens
agggcctcctgcattccgtttctctggccggaagggtctagtgttcatccctctcaggctttggcctcctcccactctcccgccctggggcccattcgtttaggaagaatgggagagccggtcgtggcccctgggcggggtaaaggagggaggcttggtaaacctctgctggggaggacccagtacagtggcagctccttgtcggggaaagaacggatctggggaaagaacggatctgcgtcacacgctcttacaggggaaccctaaggggcctgaggggtagggcttggtctccacccagagggaaggagaaatttttcgagtcgtaaagaaatgtatcagaagccatggaacatttacagccgcacacgctgggtctcccaacaaacagatccccaaaatattttccagtgctgtactcgtggcatagacccagacccacagaccaggaggaagcgctggagatgtcaacagccaac

SEQ ID NO: 1092 - DNA, 520 bp, Homo sapiens
  misc_feature 490, 510, 519: n = A,T,C or G
aaagcatacatgagatagtatctttcatttagtcctaagcttgattatttatgctcattgtaatatttcagtgacattctggacataaatttcaagtatatcaccatatacttattgttaaatatcaaacaaagctactgactgtgagggaaaaatttcagtgattttttttgtttgtttttttgttacttaccctgagatactcatcccacagtatatctgagatttagctgaacatttacaaattttaacaaattttttttctttccattgcatgcatcgatatgccaaattctgcacttcaatccaggtaaaataatgatagtgtttgtaaaccagatagtgaaaaccagtgtgttttctaatactgcccatgatagacagagtgaaatcacagcataaacagtagccaggaacctatactgcaaacatttggcttcaagtatcttgcaacaaatagctactaatatgaccatacacggtacatagnacaccacagtcctggattgnagcatgccng

SEQ ID NO: 1093 - DNA, 432 bp, Homo sapiens
  misc_feature 429: n = A,T,C or G
ctgatctacgagtctgccatcacctgtgagtacctggatgaagcatacccagggaagaagctgttgccggatgacccctatgagaaagcttgccagaagatgatcttagagttgttttctaaggtgccatccttggtaggaagctttattagaagccaaaataaagaagactatgatggcctaaaagaagaatttcgtaaagaatttaccaagctagaggaggttctgactaataagaagacgaccttctttggtggcaattctatctctatgattgattacctcatctggccctggtttgaacggctggaagcaatgaagttaaatgagtgtgtagaccacactccaaaactgaaactgtggatggcagccatgaaggaagatcccacagtctcagccctgcttactagtgagaaagactggcaaggnttc

SEQ ID NO: 1094 - DNA, 104 bp, Homo sapiens
aaaagaaacgatcaatactaaatattagcagctaaaacatcattgattcttgtggctttagaactttcacacactgagagctccataagaggaaaaaagcaaag

SEQ ID NO: 1095 - DNA, 419 bp, Homo sapiens
atgaggtcaagtgatcgagaccatccttgccaacatggtgaaaccccgtctctaccaaaatacaaaaaattagccaggcgtgacggtgcgtgcctgtagtcccaactactcggaaggctgaggcaggagaattgcttgaacccgggaggcagaggttgcagtgagccgagatcgcaccactgcactccagcttggcaatagagtgagactccatctcaaaaaacaaaacaaaacaacaacaaaataaactactgtggcagcgttggtaccctgcatcactgccatggttgtgctattctcatctcaacatagaattggtgggttctcctaagggtgtcaggaacctctaaaaagatgtgattctttgggaggggatatttgaaattccaacttccattccccctagcaaaaggaagcag

SEQ ID NO: 1096 - DNA, 112 bp, Homo sapiens
  misc_feature 47, 48, 63, 68, 79, 83, 102, 104, 106, 107: n = A,T,C or G
ttttttttttttttttttttttttttttttttttttttttttttttnncccttcctccaagtnttttntttttttttgngttnttaaaaaaaaaacaaaaancncnnccaaa

SEQ ID NO: 1097 - DNA, 202 bp, Homo sapiens
ccagggtctggaagggccctgggagcgcccaccccctctggatgagtccgagagagatggaggctctgaggaccaagtggaagacccagcactaagtgagcctggggaggaacctcagcgcccttccccctctgagcctggcacataggcacccagcctgcatctcccaggaggaagtggaggggacatcgctgttccccag

SEQ ID NO: 1098 - DNA, 491 bp, Homo sapiens
aaaaagtcagtatcatctctcttgtggagctaccagaacaggtttttcaaacagaaaaggggaacaaacgtggggaacaaacgtggggcgcttggctatgttaagaattcttatcactagaatactgcttcgagacgttcatagtactttccaaaagaagccacccacctcaaagagccctgcgcagccccagtgacccatgagtgtggcagccgtcattttattagccactgttggcaatcatcaaagtattcactcagagtggggaaattacttaatatcaacgatattaacgatttccatgtatttagctttgtgacacacaatgcacaagggtcttcaaatgtttgttttttacaccagtggtagaaaattgtcattcttcggattcaacacactggtggatgacactttagtgaagtgtgactacctagaagagcaggaaggcagctcctgattctgactgggccagcctcttccagaaggtgact

SEQ ID NO: 1099 - DNA, 218 bp, Homo sapiens
ttccagcctgcgacctgcggagaaaaaaaattacttattttcttgccccatacataccttgaggcgagcaaaaaaattaaattttaaccatgagggaaatcgtgcacatccaggctggtcagtgtggcaaccagatcggtgccaagttctgggaggtgatcagtgatgaacatggcatcgaccccaccggcacctaccacggggacagcgacctgcag

SEQ ID NO: 1100 - DNA, 199 bp, Homo sapiens
cctagagagctagagaagcaagtaagggccagggccagagtcggcttcaatggaacaacagcccagtgccctaaggcccctaactcttgctggctgtttcttgaccccaagccagggttgggagtcctctgggcatccattttttctaaaggaactggacagagtacacacaggaaaggaagctgtcaccctcttgcca

SEQ ID NO: 1101 - DNA, 222 bp, Homo sapiens
cctcggtgggtcttgcggggcagcttcttggtgtgccaacgactggtgacccctttgtagcctttgcccttggtcaccccgatgacgtcgatcatctcatcctgcccaaacacttggttcacaggtacctgctgctcaagcctctcgcgggcccagtccagcttctcggccacagtgcctccgttcacctggatctccatcaggtgggccttcttctggcgc

SEQ ID NO: 1102 - DNA, 235 bp, Homo sapiens
  misc_feature 16, 27, 113, 162, 197: n = A,T,C or G
aaaatgtcaaagtatngctatacatanttgcacttttctgctaggctgggctagtatcttccatggcaagatcctcaaactactgaataaaatacacttttaaatcaatatangtacttgattaatttccctgaaattatcaacatcattaccaaaatcttncaggattttgtaagatttgattccttaaatacagntcctaaagttaaacttatggagggaaaaaaaccctcat

SEQ ID NO: 1103 - DNA, 321 bp, Homo sapiens
ccagcggctggtaaggagccagggcttccaggtaggagaagtctggttccgtgaatatgacggtattgagactagattttccccagagctccatgaagtggaccacgtccccgaagcggagggaagggtgcccggtgaacaccacacagggctgtctaaagtcgttactgaagtctccgtggatgctggggtagtgcttcagcttattggtctgaatgagctctgcatgaggaaaaggtggttctggaagatacaccttactctgtttgttgtgacaaagccactcagcaaagatctgggaaaactccagtgaactgttgg

SEQ ID NO: 1104 - DNA, 493 bp, Homo sapiens
ctgagttacaagagaaaatgatcacatgcatcagaggcttggagaaagctaaagtgattcagccaggctacggtgttcagtatgattacttagatccccgtcagatcaccccttccctggagactcatttggttcaacgactcttctttgctggacagatcaatggcaccactggttatgaggaagctgcagctcaaggtgtgatagccggaatcaacgccagtcttcgggtcagtcgcaagcctccctttgtggttagccgaacagaaggttacataggagtcttgattgatgacctcactactctgggcaccagtgaaccataccgcatgtttaccagccgagtagagttccgtttgtcactgcgccctgataatgctgacagccggctcacactgcgagggtataaagacgctggctgtgtgtcccaacaacgatatgaaagagcttgttggatgaagtcttctttagaagaaggcatttctgtgttgaa

SEQ ID NO: 1105 - DNA, 194 bp, Homo sapiens
  misc_feature 156, 189: n = A,T,C or G
ctggtgaaggaactcaaggaggctttaggtattccagccgctgcctctttcaaacatgtcagcccagcaggtgctgcctgttggaattccactcagtgaagatgaggccaaagtctgcatggtttatgatctctataaaaccctcacacccatctnagcggcatatgcaacaccaagaggggctgatangatgt

SEQ ID NO: 1106 - DNA, 337 bp, Homo sapiens
ctgcacggaccaggttcccgcaaaacattgccagctagtgaggcataatttgctcaaagtatagaaacagcccacctgtgcccactttgaccattggtgaggatagatataaaatcacttcttccaacgaagcctaggtgaaaatctatttataaatggaccacaactctggggtgtcgtttttgtgctgtgacttcctaattattgctaaagaactactgtttagttggtaatggtgtaaaattacattcagctccttcttgtcatataaaaggaatttggagggtgtcgcttaaaattttattccacctgtacatttgtcactttacctcggccg

SEQ ID NO: 1107 - DNA, 342 bp, Homo sapiens
ccatatggtagagatgagggaaggatggactagaagcaagctgggtcttctgggtcgtctctactcctttttcacttcatcaccgttttccccactgagcttgaacacaggaatctgctgaccatccttgagctctaaaaagacctcgtcaaggtgccacctctgaaaggggccacctctggatgagtggacgtagagaaggccctctgatttggatccagagacaggaatcttcaacttggcatcaacaatgtccacgaagttttccctgtcgatgagcttgagataatggatgttgagaggagggcccagagcttcctgtgcctcgggatggctctgcag

SEQ ID NO: 1108 - DNA, 549 bp, Homo sapiens
aaattgcaaattaaagcatgtatttacatatttatatacaaaaaacttcaaaaacaaattaatccaaatcttggtccaagagtttccactttataagtggtatggtactatgctatatatatcctcttccaaaagtctcttaggacttggtaagttccaaatattcattcacaaatggttcccctttaagcttaatgaaccatatacttcatttctgagtaaattagaggaaatattacagaacacgctttgtacaatacagcaccactactgagaagggctcgaggttttgtaatccaaggttctgacttaaagcaaaaatacacggcatagattgcaacagcaaagaagtgtccaattaaaactagagggttaggagacaatacagaaagcagcccaacaggacccgcaacacattcgccaccaagtttgaaataaagaaaacaggcttttcttagttgatgcagggaatcatctgtggcagaaaataattcataaagagcctgagcaaggatattcacgacaaaggaatgagatgtttttcttgcc

SEQ ID NO: 1109 - DNA, 250 bp, Homo sapiens
ccaaactattttgaattttgttgtccggccctcagtgccctgccctctcccttaccaggaccacagctctgttccttcggcctctggtcctctctggtcccctcctgggtttcttacgtagttgatttttcctctttagtctcccccgacctgcgcccagccccgtggcccctgcccctctcctactctctgtggcagtttcatatttgctaagacgaatttgctcattaaacattttgttgtattttac

SEQ ID NO: 1110 - DNA, 544 bp, Homo sapiens
aaatcagtagtctaacaaggattagaaaagacaaaactctgttcagtgtttctgacaaagtagaaagggtgaaaacataaataaggctttaatttggcaaaatataatacaatgccttttttatcctcaaatgaacagtttcccaattacttcactctaacacctggtagtgctctttctcctttgtgagctgttggtttaccgcctgaagcaactgctgtaactgtgttacagtctgatttagacttacagacattgtctccttctcagaagactccgtttctggggaaacatcactattttcaataacagtagtgtctccagcagcttttactatttttgactggataagctccagtgactgttgagccttatgcaaatcaccagctaccttctgtctttcattttgttcagttctaagttttgtgagtgtttcatttaactgtgccttcaactctctgacttctgtaacataggtagatcgttccatctctgccttttctagttccatttccaaatgttctcgttctcttctcagattttc

SEQ ID NO: 1111 - DNA, 402 bp, Homo sapiens
cctcaaagaggtggagagacttatccaagaacgtggctgggagttcatgtggaatgagcgtttgggatacatcttgacctgtccatctaacctgggcactggacttcgggcaggagtgcacatcaaactgcccctgctaagcaaagatagccgcttcccaaagatcctggagaacctaagactccaaaaacgtggtactggaggagtggacactgctgctacaggcggtgtctttgatatttctaatttggaccgactaggcaaatcagaggtggagctggtgcaactggtcatcgatggagtaaactatttgattgattgtgaacggcgtctggagagaggccaggatatccgcatccccacacctgtcatccacaccaagcattaactccccatcgccag

SEQ ID NO: 1112 - DNA, 363 bp, Homo sapiens
cctaagacaatgaaaggaagccagagcaacagaccaccttgggatccggggagaagggtaaatgggcaaaagggttgtatttcctgatgctctcagaacatcagaccacaccatgtgaatttaagcaggactattttaagtggggaaacaatactagaagcatttggtgtattttcctggcactcacctcctaggtaagcaggagagcgggacactcaggagttgtgactaaactcacacttaagctgcctgtccagaccgtccccttggctgaacacaacactgaaattgtggcagtgtctgttgccccagtggacctcccacttactaatgagtatgtaaaacagaggagccacagtgagg

SEQ ID NO: 1113 - DNA, 223 bp, Homo sapiens
aaaagacctttagtccgttctacttttcttgaagagggaggaccgtaagggatataaaggtttcactgaatactaagagcctgaaaaactgcttggctgatttgactaataaaggctggtctgttatcagactgtatagaggtgggaaggctaaactgaggaattgtgtctgacagaagggaagaaatgactgtggtgaccttctcagaccctgtaggaaagg

SEQ ID NO: 1114 - DNA, 452 bp, Homo sapiens
aaaacttgctttgtttagaattcccacctcatttttccatggacaaaagtattctttatgtcctagtgcacttacaatttggtattacctgggagtgaaaagaaatattacagccatgcctaactgacttcttgaggtaagattgttctgtcagaaaaccctctcccagttcccctgcagctcttcaggaatccacatctctccagagctctttgttctcatgggtggcacctccagagtgaagaagatcctttgtcaagaagggaaacagaggggaaatgagagggtcctgcaggcagagctggaatcaacttccactctgcctcttgcaagctgtgtgaccctgggcacaatttctccttcctctggaaacctctgttttcttagatttggagcagggtggtcacactgaccttgcagagttctgagaatcagagacagaacataaaagg

SEQ ID NO: 1115 - DNA, 367 bp, Homo sapiens
ccagttgggcagctctttccacgatggctttgcggttcttggaggaaacattgtgagcaatctcggcacagtaagatttgttgcacatcagcagcacttccagctccttgacgttgtggaccaggaacttccggaagccactgggcagcatgtgctttgtttttttgttgcttccataaccaatgttgggcatcaagatctggcccttgaatcttctacgaaccctgttgtcaatgcctctgggtttccgccagttacgcttaattttgacatatcggtctgactggtgccggatgaacttcttggttctctttttgacgatcttgggcttcacaaggggtctgagggcggccatgatgccgagaag

SEQ ID NO: 1116 - DNA, 387 bp, Homo sapiens
ccataaaggaggtaaaaatgaaaaccataacctaacttttatagaggctttatctttaatttaacgatgtgcggaggactttcttgcttgaatctgttccgggctgtctgctctgtccatcaaatgggcaggtctggaatggggcaccttcggccgttcagaagtggcctgaacagaatgctggaacccaggctggactcggacacactaaggttttgattttgaatttcagccttattagaagatctaacctaagagtaagctaaccacagggattcttttgtagaacactttttatgcagatgaagctattttttccagcaagtagattcttccagtttttccaaggagtaatttccccgaattggcataccacggcgtggacag

SEQ ID NO: 1117 - DNA, 316 bp, Homo sapiens
cctttgtccggcaccctgcccacaggctgagctcagccccaggccctttcaggcatctagacactcccatagcctgtcaggctggggcaaggagatcccaggtcacacatactccttggaagagttggacttagggtaagagcggggtgcacggtacccagccttgctctcattcccaggacaggaacaggagagcagtgcacctcccaggatgactagggcagaccctgcccagccaataaagatggcagggccaaactcatacttaatgttggtagggatcaaagggttataaaagtctgtgacaatctgatgg

SEQ ID NO: 1118 - DNA, 448 bp, Homo sapiens
ctggcaaagataatgcttctgctgggctgaaacccatctgaaagagaaaaaagttagctttacctgaggaaaggttatacacagacaaggatggaaggtatcccacttaagatgaatcagaaggtctaattccaagatagcggattccaaaatcttttttttctgagccaaaaaagaaaaaaaaaactaacaaaatctttttttgagaccccaggtaaaagaataaaagaataggaataatttttttttaagtaacctacaaagagcaagataggagatctgcaaataagattttgagtacatagcaggggccagtagtcaccctttcacaatttcattcttggagttccttaacttctggacccagagatcattgaaaacagtgtaagcatgatgatgcacatcttgagaaaaatcttcagaggtaaatccaaacattgggattttt

SEQ ID NO: 1119 - DNA, 473 bp, Homo sapiens
  misc_feature 447: n = A,T,C or G
cggccgaggtaaaaaaagctgagggtgattagacaagttgacaagttgttttgaaagaggtaactggcttagtacaaaaatccatagtttattggttggtgctgttgaggagttgtagtgctggtgaaataaaattttccaggatgcagtggtcatcgcaatttggcccaattcaaaggttcaaggtaagctcctgtattgttttttttttggagcttttaattttttttcaagttgcaggtcatgtagggagtcctttttagaatggcttcctccctccattttagagctctgaaccaaagtgatgtcatttattttattttatttatttattttttaagatggagtctcactctgtcacctaggctggagtgcagtggtgcagtctcggctcactgcaacctatgtctcccgggtccaagcgattctcctgcctcagcctcctantagctgggattacaggtgcacaccac

SEQ ID NO: 1120 - DNA, 489 bp, Homo sapiens
cttggtggtgaaggttctggagaagtcagaccagaccaacatcctgagtgccctacttgttttgctccaagacagcctgctagcaacagccagttctcccaaattctcagagcttgttatgaagtgtctctggagaatggttcgactgttgcctgataccatcaatagcattaacctagacagaattcttctggatatccacattttcatgaaggtcttccccaaagagaaactgaagcaatgcaaaagtgaatttcccataaggaccctaaagaccctgctacacaccttatgcaaattaaaagggcccaagatcctggaccacctaacgatgatcgacaacaaaaacgagtctgagctggaggcccatctctgccggatgatgaagcacagtatggaccagactgggagcaagtctgataaggaaacagaaaagggagcatctcgaatagatgaaaaatcatcaaaggccaaagtgaatgatttctt

SEQ ID NO: 1121 - DNA, 527 bp, Homo sapiens
catcaatgtagaactcagccttcttggaaagaaaaaaaagaggctccgggttgacaaatggtggggtaacagaaaggaactggctaccgttcggactatttgtagtcatgtacagaacatgatcaagggtgttacactgggcttccgttacaagatgaggtctgtgtatgctcacttccccatcaacgttgttatccaggagaatgggtctcttgttgaaatccgaaatttcttgggtgaaaaatacatccgcagggttcggatgagaccaggtgttgcttgttcagtatctcaagcccagaaagatgaattaatccttgaaggaaatgacattgagcttgtttcaaattcagcggctttgattcagcaagccacaacagttaaaaacaaggatatcaggaaatttttgggtggtatctatgtctctgaaaaaggaactgttcagcaggctgatgaataagatctaagagttacctggctacagaaagaagatgccagatgacacttaagacctacttgtgatattt

SEQ ID NO: 1122 - DNA, 474 bp, Homo sapiens
aaataaggtgatagtaaattataccttgtagttaatagtaatcaatcaatcaatcactacagtaatcacaaataaggtaaagtctaaattactgccttagcaaacactatgttgtcaggtttttctgctgcaagcccaaggcgggaaacactgcagttattagaagtgagcccaatgatgaatttgcatttgaagctgggagaaagaggaaaaaaagtgtgttctgattatggcatcgagacactgtagcctaaaaaagcaactttattaatgtcctgcagcagcgtacattagtaattataacaatgcattaaaattttcatttcatgtcatagagaatcagttttcttcatgatacattatgttttactgagtgagtttgtccctccagagacctttctgggaacatgccttctccagggactgcttcctaagatgcccaggttgcttaccacaggtcatctttggtcattt

SEQ ID NO: 1123 - DNA, 474 bp, Homo sapiens
tgcaaggcatgggggtgtctgctgcccaggccacttacagtggcctggagagccagtcagtgagtggctgttacggggccggctacagtgggcagaacagcatgggtggctatgactagttttgttaggaacatttgagttacttcaatcattttcacaggcagccaacaagcaattaagagcagttataatagaggaagctgggggacccattttgcaccatgagtttgtgaaaaatctggattaaaaaattacctcttcagtgttttctcatgcaaaattttcttctagcatgtgataatgagtaaactaaaactattttcagcttttctcaattaacattttggtagtatacttcagagtgatgttatctaagtttaagtagtttaagtatgttaaatgtggatcttttacaccacatcacagtgaacacactggggagacgtgcttttttggaaaactcaaaggtgctag

SEQ ID NO: 1124 - DNA, 173 bp, Homo sapiens
ctgatcgcttctcagcgctgcgactggaactttcccctccattactggaagaaacagtcttagttttcacaggtttttctgcttcttcttcaggtcctccggcggctccagctcgctgcgacttttcaggcttctcgtctcccgccttcccgtccgccattttccactccctg

SEQ ID NO: 1125 - DNA, 325 bp, Homo sapiens
cgaagccaagagaaactgaggaaactttccaaaccagtatatctcagatctcatgatgaagtttcctaatctagaggaaagtttatttctgcaaatgatgagccaactagttattgaatgtaaaccagatggcaaaacacttcttgattaggggcaaaaattcaaatgtcttcttaaaacctccacaattgattctccccctgtgatgtaaacttagatatccctagagtttctcagcatctttcttcctgagtggatggcattatccctagaggtcatggaccttacatcctcactgcagtcacctttggaaacaagaccgagg

SEQ ID NO: 1126 - DNA, 268 bp, Homo sapiens
  misc_feature 266: n = A,T,C or G
cctgagcgaccacctccctgttcaggcccagcctctggagttcattcctatcaatgtcattttgattgtgcagtaagatgaaaatttgtcattacaatagttacagtgacagagaaatgcacactatgtatcaaatagcaaggaaatgaagcaaattataacacagtgtggcaacgcacgagcaagtaaccattagagtagcattactttgtccagtaaatgcttcagttccaccacttgtacacttaccaatgatttacctcggncg

SEQ ID NO: 1127 - DNA, 163 bp, Homo sapiens
aaatttacagttctgctcatgcccaatggccccatgcggataaccagtggtcccttcgagcctgacctctacaagtctgagatggaggtccaggatgcagagctaaaggccctcctccagagttctgcaagtcgaaaaacccagaaaaagaaaaaaaagaagg

SEQ ID NO: 1128 - DNA, 482 bp, Homo sapiens
  misc_feature 361, 437, 479: n = A,T,C or G
ccaaagacaatgttcctttccatagcttagtctttccttgctcagccctaggagctgaggataactataccttggtcagccacctcattgctacagagtacctgaactatgaggatgggaaattctctaagagccgcggtgtgggagtgtttggggacatggcctaggacacggggatccctgctgacatctggcgcttctatctgctgtacattcggcctgagggccaggacagtgctttctcctggacggacctgctgctgaagaataattctgagctgcttaacaacctgggcaacttcatcaacagagctgggatgtttgtgtctaagttctttgggggctatgtgcctgagatggngctcacccctgatgatcagcgcctgctggcccatgtcaccctggagctccagcactatcaccagctacttgagaangggtcggatccgggatgccttgcgcagtatcctcaccatatntcg

SEQ ID NO: 1129 - DNA, 313 bp, Homo sapiens
agcgatttgctggtgtagacatccgtgtccgtgtaaagggtggtggtcacgtggcccagatttatgctatccgtcagtccatctccaaagccctggtggcctattaccagaaatatgtggatgaggcttccaagaaggagatcaaagacatcctcatccagtatgaccggaccctgctggtagctgaccctcgtcgctgcgagtccaaaaagtttggaggccctggtgcccgcgctcgctaccagaaatcctaccgataagcccatcgtgactcaaaactcacttgtataataaacagtttttgagggatttt

SEQ ID NO: 1130 - DNA, 553 bp, Homo sapiens
  misc_feature 516: n = A,T,C or G
ccaaaagaaattagcaatgggaaatggttgctttatttggtgaaagtagaatccaaaggattggaaaaggtaacttgtgagccacaaaaggagataaactccctgaacctaacggagtctcacaactcaagaaagaaacgggaaattactgaaaaacagatagatgataacagaaaattttctttatttgctgaaagaaaataccagactcttaactgtagcgtgaacgtgaactgtgtgaacatcagatgcccgctgcgggggctggacagcaaggcgtctcttattttgcgctcgaggttatggaacagcacatttctagaggaatattccaaactgaactacttggacattctcatgcgagccttcattgatgtgactgctgctgccgaaaatatcaggctgccaaatgcaggcactcaggttcgagtgactgtgtttccctcaaagactgtagctcagtattcgggagtaccttggtggatcatcctagtggctattctcgctgggatcttnatgcttgctttattagtgtttatactatggaagtgtg

SEQ ID NO: 1131 - DNA, 158 bp, Homo sapiens
ccgccgcttgtgctgcagccatgtctctagtgatccctgaaaagttccagcatattttgcgagtactcaacaccaacatcgatgggcggcggaaaatagcctttgccatcactgccattaagggtgtgggccgaagatatgctcatgtggtgttgagg

SEQ ID NO: 1132 - DNA, 379 bp, Homo sapiens
ccagaatggtctggatctcctgacctcgtgatctgcccgcctcggcctcccaaagtgctgggattaccggtgtgagccaccgcacccagcctaaagttggtttcttgaagcagttgatgagattgggatcctggttttcagaaatgattggagtgatttatgtaagttgggaggggttttttgatggggttggtaaggtcttacgttaaaggaaaggtatacagagataaatattggtacttgagtcattagctttcaaagaagcctggggtaatggaggaaaggtaagaattgattctgacagaatcttgagatgggcagaattaacatctggaagaggtcacagtgtcctgatttaccttacctgtgtccaggatgg

SEQ ID NO: 1133 - DNA, 252 bp, Homo sapiens
  misc_feature 205, 248: n = A,T,C or G
ctgaccaggcttggagaatgagaaagggttcccaaggacaggatgccagcgggattctttgttgcaaactgcacacagtgcaatttttgggaagcagggatggggagtgggcatgagaccgggttgttgggaccactctggggtcaggccctgggtgaggcacaggaggctgcacacaggcacttggtgggttctgccgggtcanggtgggaaggcaggagtagtgtctgtggcaggacgggaagaancttc

SEQ ID NO: 1134 - DNA, 533 bp, Homo sapiens
  misc_feature 401: n = A,T,C or G
ccagcccaaacagtgtattaatcattagcaaatggaactttaaggagtccttatcattaaggtagtacaagtatttatattgtaaaactgatgtgtagcttgatctttaggggacaggaccaccaaccaatacatgcagattttgtgtgtgtggacagaaggtacttttgacattcagttttgctatatagaaacagaatgaataaatgaacttttttcttttttcttttttttgcaagaggtaagtaaaagattcaatttgattcttctagaggggggaaaaaggagttgaaagtaggtcttcattttgcagtcatcatctgtacgaattcttcatagttgacttgtccgtctccatcaatatctgcttctctgatcatttcatctacttcttcatctgntagtttttctcctaagtttgtcatgacgtgacgtagttctgctgcactgatataaccattgccatccttgtcaaagactcggaatgcctcacggatttcttcttcactatctggatctttcatttttctagc

SEQ ID NO: 1135 - DNA, 101 bp, Homo sapiens
ctggctaattcagtcatgcaaactctgctctcacagttaaaacagttctatgagccaaaacctgatctgctgcctcctctgaaattagaagcttgtattct

SEQ ID NO: 1136 - DNA, 369 bp, Homo sapiens
gtgaggtcccagcttgaagagaaagaaaacaagaagttccctgtgtttaaggccgtgtcattcaagagccaggtggtcgcggggacaaactacttcatcaaggtgcacgtcggcgacgaggacttcgtacacctgcgagtgttccaatctctccctcatgaaaacaagcccttgaccttatctaactaccagaccaacaaagccaagcatgatgagctgacctatttctgatcctgactttggacaaggcccttcagccagaagactgacaaagtcatcctccgtctaccagagcgtgcacttgtgatcctaaaataagcttcatctccgggctgtgccccttggggtggaaggggcaggattctgcag

SEQ ID NO: 1137 - DNA, 519 bp, Homo sapiens
ccttctcctgtgcctgggtgaaggtacagacctcgctgtgtctccgatgaggtcagaagtgtctctatttcataccacaaaggaacccaagtgggagtagggaacagatggatggcgcgaagacctctgtgtctccccagagaaaggaagaaacttaagaaccatcatagcctggtcctccaacatcttacagatcatgttttccaagagaaaagcctgtgttttcagaaactctgaattcagaaaaagaaacggaatgtgcgtaagaatcaggccactgcctggaaagactttctctcaattcgtagcctgaggctcagtgaaggaaacatgcagaaagaatgcctgagacgcccccagggaataagggaactctttataacctccagtgctgtcatctgggatttttctctgaagtacaagaatttcaggtgatttaagctgcttgatcacacttatttgtgcaaaattgattttcatttaatgttaatgttttcctgcttaattttatataacttc

SEQ ID NO: 1138 - DNA, 511 bp, Homo sapiens
aaaagcagtcaagctgtctggactgcaccctctcaactgaagttgagccaaattcccttctctcaaaccctaacgccgccatcactaagagaatgggcatctcggcttggtcagagcattactaacaagctaatgtgggattctctttggttatgaatttttatttttatttaagcatacaaaaaatacagctagaagtaggctcctgcattctaaaagcatttttaatcaacttaaactatgttcttggaaaattcaccacctggactggttcagtctgcccatttccctgtggaatctagtatcagtgttgtatttagcaaattcatttgagtgacgaacagtgactgatattcaggagccccgaggggtgggggcggccggcctgggcagacttagatgctgtccatagctttgaactcgctgagggcctgcaccgggttcacgtgcttcttctgagatgcccgtttaatcttggtctgtgtctcatcctgtttctctctcttcacca

SEQ ID NO: 1139 - DNA, 533 bp, Homo sapiens
  misc_feature 422, 518: n = A,T,C or G
ttttttttaaatatttattccagttattctaattcagaagcattcttttcaagtaacagcagcacttgtgaaaggaaaaaaaatgcacatgtttcttagtaggttactaaatttgtacaattaattaagattttagccatcagtgagtttgaaaagggaaatgtatttattttcagcattaaaatgcttccaaaagatcaagttgcttttgtttgtttgtttttttaaccgtaatgtagatggagaaattggaggcaacctcagtataggaactgccactttgaacagtttaggtcttaaagagaaagtcaatctaatgccaaggggagaacaatgagctgaaattgtaccaactcctctggccctccttccctcaattaaaaaaacacacttaccagttttgcttattttacagatatctngtggttctatagtttaaagcagcttgtgaaattaaaaaagtggactcaattttgtttacctttctgtaagtttttcatttttgctgtatagcattngcaaaaatatgtaca

SEQ ID NO: 1140 - DNA, 338 bp, Homo sapiens
  misc_feature 79, 80: n = A,T,C or G
cctttctactcaggctaatgacaaacacaataaaggcagatatgctagtttaacataattggctgattttatacagcannttatatcttttagtccacaagtatattattaaatgatagagaacatctaatacaaccatttctacagaactaggaaataaatttctaagaaagaaagattttacagaccccatcttttatacccaccccaacagtctaactctaaagaggataaagccaatgactttcctcacaagagctcacgactaacgtcgctttgctatcaaaatctgtatttctgatccgttatgagcattgagacaagattcaaatattccc

SEQ ID NO: 1141 - DNA, 88 bp, Homo sapiens
ctcagcctggtgaaccacacaggccagcgctctgacatgcagaaggtgaccctgggcctgcttgtgttcctggcaggctttcctgtcc

SEQ ID NO: 1142 - DNA, 196 bp, Homo sapiens
  misc_feature 80, 165: n = A,T,C or G
tttttttttttttttaggatcttaaaaaaccatttaataaaaaaaatctttgaagggacaaatgggaagttttcacttanagtttgatttacaagacaataggaggaatcagatttgggaacacaacaggcttgaacactttctggagactgagagacagttcanagtcagccctcaccgttaaccagacccctgg

SEQ ID NO: 1143 - DNA, 482 bp, Homo sapiens
  misc_feature 420, 439, 465: n = A,T,C or G
aaaaaatgggatcaaaggaagaggaaaatgggcaaggtcatctcaaaaggaaacgacctgtcaaagacaggctagggaacagaccagaaatgaactataaaggtcgatacgagatcacagcggaagattctcaagagaaagtggctgatgaaatttcattcaggttacaggaaccaaagaaagacctgatagcccgagtagtgaggattattggtaacaaaaaggcaattgaacttctgatggaaaccgctgaagttgaacaaaatggtggtctctttataatgaatggtagtcgaagaagaacaccaggtggagtttttctgaatctcttgaaaaacactcctagtatcagcgaggaacaaattaaggacattttctacattgaaaaccaaaaggaatatgaaaataaaaaagctgctnggaagaggagaacacaagngttggggaaaaagatgaaacaagctnttaaaagtctaaatttt

SEQ ID NO: 1144 - DNA, 249 bp, Homo sapiens
ctgctgcagagcagccagcagggagtccctgcctcactcggaggtccctgagcccaatcccacaccctgcagagttctcccctctctctgatccaggccgggcctgtacagaggtgctggctgcttgtttacattctcctctggggctctacctctccacacttccccagaagggaaaagggcaccctggattactctttggaaatcactccttggtgggcagcatcctgaggcttccccagaaccagg

SEQ ID NO: 1145 - DNA, 344 bp, Homo sapiens
cctggaaaacattctccaaaaagaagctgcaacatgtgtggacaatgggcttttcatgcctctcttactgtctcttactgtctattgatctggtgcaagaaacatgctctggtgatggctgtgagggaggaatgaggatagacatagacactcctgtgtctcaaacatgcttctttattactctgttatgactctgtcttccctggggcaggaccccagcctgcctacatttgcagacagacacagtggcatgtggagacaacagtgtgtcccaaagacttttctttaccccctagctgtcggcagtactcagtggaagggtgatattatgacactgacactgc

SEQ ID NO: 1146 - DNA, 373 bp, Homo sapiens
cctgtggattggcatccaaatacagagtcttacgcagcggggacgtgggtgcgcgccccgcatgccacggaaagcttacataagtttaacttgaacagagcttgggaaatggggctgcaaaggagggcagttcccacgccaggaaccaacgtgaaagcattggaatcagcacaacagccatggaatcaggcaggcaggggaggacgggctgtgtccttctgagctctatagtacagcaagatttcaagcagtttccagaaaaacaacaacaacgacattttctttccttatcgacgggatattttatggttctggaagcttcgtgttgcacataggaaaaaaaatttctctgaaacgtacaattcatagggac

SEQ ID NO: 1147 - DNA, 432 bp, Homo sapiens
ctgcaggagcaggatcagaagcaagcctatgaaaaacaacagaagcatgcagcgactttcttttatagcaccgcagcatcccaggaagcccagaatcatgatgatggcacctacagcaatcaatatgtccacagcaacgtaggagctagagcctacatcttcagaaccaaaaattgcttgagagtcattgcttactcgtacccatattgctaatgctaggatcaagataccacatagccagaacaagaagttgaaggtaaacatagaatattttatacaggcactcacacctgccatttcggaaaaggattaggaatccagatgccgtgaatttaactattcgttacaggcttgtcctgcaatatgctctggagcaacttgcctgcagagatttctgtatccacggcttcagagcagaaagagaaagcaaag

SEQ ID NO: 1148 - DNA, 299 bp, Homo sapiens
ccacactcatccatcaggtgctggaggcccctggtgtctacgtgtttggagaactgctggacatgcccaatgttagagagctggctgagagtgactttgcctctaccttccggctgctcacagtgtttgcttatgggacatacgctgactacttagctgaagcccggaatcttcctccactaacagaggctcagaagaataagcttcgacacctctcagttgtcaccctggctgctaaagtaaagtgtatcccatatgcagtgttgctggaggctcttgccctgcgtaatgtgcggcag

SEQ ID NO: 1149 - DNA, 543 bp, Homo sapiens
ccaactatgcctctcagaacatcacctaccactgcaagaacagcattgcatacatggatgaggagactggcaacctgaaaaaggctgtcattctacagggctctaatgatgttgaacttgttgctgagggcaacagcaggttcacttacactgttcttgtagatggctgctctaaaaagacaaatgaatggggaaagacaatcattgaatacaaaacaaataagccatcacgcctgcccttccttgatattgcacctttggacatcggtggtgctgaccaggaattctttgtggacattggcccagtctgtttcaaataaatgaactcaatctaaattaaaaaagaaagaaatttgaaaaaactttctctttgccatttcttcttcttcttttttaactgaaagctgaatccttccatttcttctgcacatctacttgcttaaattgtgggcaaaagagaaaaagaaggattgatcagagcattgtgcaatacagtttcattaactccttcccccgctcccccaaaaatttgaattttttttt

SEQ ID NO: 1150 - DNA, 311 bp, Homo sapiens
ctgaagatgatgaggatgacgatgtcgataccaagaagcagaagaccgacgaggatgactagacagcaaaaaaggaaaagttaaactaaaaaaaaaaaaggccgccgtgacctattcaccctccacttcccgtctcagaatctaaacgtggtcaccttcgagtagagaggcccgcccgcccaccgtgggcagtgccacccgcagatgacacgcgctctccaccacccaacccaaaccatgagaatttgcaacaggggaggaaaaaagaaccaaaacttccaaggccctgctttttttcttaaaagtacttt

SEQ ID NO: 1151 - DNA, 55 bp, Homo sapiens
ttttttttttttttttttttttttttttttttttttccaagaattgggaaggttt

SEQ ID NO: 1152 - DNA, 358 bp, Homo sapiens
ccagtacaacacctatcccatcaagctcttctatacgtccaacatccccatcatcctgcagtctgccctggtgtccaacctttatgtcatctcccaaatgctctcagctcgcttcagtggcaacttgctggtcagcctgctgggcacctggtcggacacgtcttctgggggcccagcacgtgcttatccagttggtggcctttgctattacctgtcccctccagaatcttttggctccgtgttagaagacccggtccatgcagttgtatacatagtgttcatgctgggctcctgtgcattcttctccaaaacgtggattgaggtctcaggttcctctgccaaagatgttgcaaagcag

SEQ ID NO: 1153 - DNA, 309 bp, Homo sapiens
aaacttgatccaacctctttgcatcttacaaagttaaacagctaaaagaagtaaaataagaaggcaatgcttgtggaatgtacagtgcatattggcggcgcacgcctcattacgattcgcctgcttgcttctcctgttcaatcgtttctttggaaggcagtggatttttctcttgcgtctctgtcttcttcagtttcgacttatcgaatttctcgatctcagccatatcgggtttgtcagacatggttgcggaggaaaagcgaagcgaggcgcacgagtacgagcgaagtctggtctgcgcagtggcca

SEQ ID NO: 1154 - DNA, 332 bp, Homo sapiens
aaagaatcagcaaaatttcaaataaaaaattatgaaaatattatcctcattagttcatttagtcccatgaaattaattattttctctgcttgatcttggtggacagtttcatgaagctgtcagttagttcattaaagttttggaaattctcagacagtgcagtggtatcagaaacttgtattcaagagtacaggtcagagtcttcttttcttttctttttgagatggagtcttgctctgttgccagactggagtgcagtggtgcgatctgggctcactgcaatctccacctcccgggttcaagcgattctcctgcctcagcctcctgagcag

SEQ ID NO: 1155 - DNA, 535 bp, Homo sapiens
aaaaaaaaatcgccaaaaaactggacttagtttcatctattgtaacatttacctgagatgatcatttctttagtctagaatttgccccaaatcagaagtatacctctgaattatctgtatgtgtcctggattccttggggtcagatttttcctctggtttccaaggcatttttttttctttaatgcagtaaaaccattcctttaaaacccaaaatctctcatggaacccctacgtatcaaatatataaagcaggagctgcccttgttcagggataatatgtggggcttatggctctaagaaacacagtttgacattcactgctctccttacttcagttacctcatggtatagataaatgggctgggcccagagaggggccatgacctgtcctgggacacgcagccactgaagcctttagtccagtgctccttccacagcaccacactggattctggagtctttccagccagggcagaggaagctgcaacagtgccacgataagagtttctgggtcttctggtacctaccctctca

SEQ ID NO: 1156 - DNA, 518 bp, Homo sapiens
  misc_feature 45, 346: n = A,T,C or G
tttttttttttttttttttacaaagtaaactatgatttttattgngaaattttcatagatggaaaattgaatattctgtccatttcattttacaattatcttaccacttatttttgtaccatgtatttcaattgcctgtttagtgaaaaataaaaattaaaaaaacctattcatttttggcttgtgtttagcttaaattttatcattaaattaaggagcccacaacaaaatgtgttgccagcagccatatcccaagcccctgcgtgaagaatgttttggctgctatttcaacctaaggaaacaacgtttgacctcagtcaccttaaaatgccagtgtgggcagaanattttttattcctcacaattaaaaaccaaacaaaaacccctaggatcttgaaggtcctatttcagaaaatcttcatatatgcaaaatgtcaccaaaataaatacatttgcctcaattatcattaccacccagtattcatgttttaatttttagggatataatttctaaattt

SEQ ID NO: 1157 - DNA, 498 bp, Homo sapiens
ccagagttgactctaggtagtgatgtgattttcttgggatgtttttctaaatattcttttatgctaaagcacatggcttgatacttctgttgattaagctcgtgtctacttacagtcatctagtgagaacctgtggtgtggtgagatgataacttggtctttggtcttcatcatttgaactagttttggttttgtcttgtcccttccttgagcattttgtgtgtgtttaatcctatttggtaaacgaaccactgtgaaagaccaagttggagaaaacagaacacccccaaaacatttattttttttttagaaaatcatggctcactatggtagtatacaatattgttttcacacatgtacacttgaaaccaaatttctaaaacttgtttttcttaaaaaatagttgttgtaacattaaaccataacctaatcagtgtgttcactatgcttccacactagccagtcttctcacacttcttctggtttcaagtctcaagg

SEQ ID NO: 1158 - DNA, 451 bp, Homo sapiens
gatgaatgcggctgttaagacctgcaataatccagaatggctactctgatctatgttgataaggaaaatggagaaccaggcacccgtgtggttgctaaggatgggctgaagctggggtctggaccttcaatcaaagccttagatgggagatctcaagtttcaacaccacgttttggcaaaacgttcgatgccccaccagccttacctaaagctactagaaaggctttgggaactgtcaacagagctacagaaaagtctgtaaagaccaagggacccctcaaacaaaaacagccaagcttttctgccaaaaagatgactgagaagactgttaaagcaaaaagctctgttcctgcctcagatgatgcctatccagaaatagaaaaattctttcccttcaatcctctagactttgagagttttgacctgcctgaagagcaccagattgcgcacc

SEQ ID NO: 1159 - DNA, 375 bp, Homo sapiens
cctcttgggtgcattgggatccttgaacttcttttttgtctcccctttgggagggatataggttttcatttctctttcataacgggccttgtccgcttttgccatatcttcaaattttcctttctctttagcagacatggtcttccacctctctgagcacttcttagaaaactctgagaagttgactgaagcatctgggtgcttcttcttatgctcctcccgacaagtttgcacaaaaaatgcatatgatgacattttgcctctcggcttcttaggatctcctttgcccatgtttagttatttttcctcagcgaggcacagagtcgcccagtgcccgtccggctctcacttgccccggcgctgtctctatggagc

SEQ ID NO: 1160 - DNA, 354 bp, Homo sapiens
ctgagcctgcactcataaatatgatactgtcctgcttctcccttgctaatataggcaataaagagctttctgaaggggaagaaatattattattaaactgatttaatgaattactataattgcagtttcaataattagttttgtaaaatgcaactggtatagcagtttttgaagttttctaattttttccttctgttcactttggttctgttaggtttgccttttcaccattgtctgaggaagaggaggaggatgaacaaaaggagcctatgctgaaagaaagctttgaaggaatgaaaatgagaagtaccaaacaagaacccaatggaaatagtaaagttaacaaagcacagg

SEQ ID NO: 1161 - DNA, 88 bp, Homo sapiens
aaacagttggaacaccggtggcactgttaactgctttctgggcagcctctttagcttggtgggcttgtagtacagctacagcttcatc

SEQ ID NO: 1162 - DNA, 74 bp, Homo sapiens
cctcagccatgaagggtccaacagttctcttcagtgggctgggtcaaaattacaaggggaattggatgcattgg

SEQ ID NO: 1163 - DNA, 86 bp, Homo sapiens
aaatacatcgtgacctgtgtaattatgcagaagaatggagctggattacacacagcaagttcctgcttctgggacagctctactga

SEQ ID NO: 1164 - DNA, 132 bp, Homo sapiens
aaagaggattctcataaggaaagcaatgactgttcttgcgggggataaaaaagggcttgggagattcatgcgatgtgtccaatcggagacaaaagcagtttctctccaactccctctgggaaggtgacctgg

SEQ ID NO: 1165 - DNA, 434 bp, Homo sapiens
ccgggcaggtctgtatcaccacagttaatagatgtctgatgtgtcccagtcacagagataatacaaatgtgaggaaataatgctggtgcctgaaagcattggagaccatttgtaagaatgccatttggtagttaaagtgaacatgaaaattgtttagtttttcttggtttcataaacattttttcttcctgtagaactgataaatttcaaacggaagagagtggcagcatttagaaagaatctaattgaaatgtctgaactggaaataaaacatgccaggaacaatgtctcccttttgcagagctgtattgacttgttcaagaataactgatatgccttcactcagaagaaaagaaatgaatgtgaaagaaagccaagcatcacttgcacttaaatcattaccacggaagatatattagcttcaactttagttt

SEQ ID NO: 1166 - DNA, 398 bp, Homo sapiens
cctacagacttatttcttcttggacacacccacggtgcggccacggcggccagtggtcttggtgtgctggcctcggacacgaaggccccagaagtgacgcagccctctatgggcccgaatcttcttcagtcgctccaggtcttcacggagcttgttgtccagaccattggctaggacctggctgtattttccatcctttacatccttctgtctgttcaagaaccagtctgggatcttgtactggcgtggattctgcataatggtgatcacacgttccacctcatcctcagtgagttctcccgccctcttggtgaggtcaatgtctgctttcctcaacaccacatgagcatatcttcggcccacacccttaatggcagtgatggcaaaggctattttcc

SEQ ID NO: 1167 - DNA, 534 bp, Homo sapiens
  misc_feature 508: n = A,T,C or G
aaacactgctggtgctttatgaaaggatttctgtttacctgttgcacacgtaacatgttcttacgaagttttctcgctgtgtagaaaatgcttaaaatgtctacatcattttcattacacccccttaagcatgtttttccttcacaaggtgcagtccattgacagtgttccgtattgcacgtgcaatttaactttattagcactatttgtagcaaacacgagcctagtgaattacagatctgtgtgggccagagggattttgccacgtaataatgaagcttgacagggtcattctcataaactgtctggctacatatatatttttgcatttaatgcctattcaatatattctgaaggtgctactcttggtgttatcaagagttcataggggttagggggaagtaagagcttgttaatgtatttgggaagcacacctatgttcacagacacaaaatggaattgcatggtcacccccttagtcttggtttgttggctttttgtattgaanaaagggttaaataaaaacaaaaataa

SEQ ID NO: 1168 - DNA, 495 bp, Homo sapiens
ctgcaataatccagaatggctactctgatctatgttgataaggaaaatggagaaccaggcacccgtgtggttgctaaggatgggctgaagctggggtctggaccttcaatcaaagccttagatgggagatctcaagtttcaacaccacgttttggcaaaacgttcgatgccccaccagccttacctaaagctactagaaaggctttgggaactgtcaacagagctacagaaaagtctgtaaagaccaagggacccctcaaacaaaaacagccaagcttttctgccaaaaagatgactgagaagactgttaaagcaaaaagctctgttcctgcctcagatgatgcctatccagaaatagaaaaattctttcccttcaatcctctagactttgagagttttgacctgcctgaagagcaccagattgcgcacctccccttgagtggagtgcctctcatgatccttgacgaggagagagagcttgaaaagctgtttcag

SEQ ID NO: 1169 - DNA, 475 bp, Homo sapiens
ccagaactcctcactgggcattatttggtgccagtgaaagaggctttgatcccaaggacacaagacatcagagaaagaacaaatcaaaggctatttctggatgttgagattatctgatttcaaggtactgaaggacaaaaacttggatggcctcaaaaggttcttgaacaccactgtgattctccaaggacgaattacgtaaattatactttcatacaaaggagacgataaggcagtaaacatggagacacgggggacagcgtccacactcagagggcctgggccacagccccgatgtttcttttcagaactcagcccctttcctgattttacttctaagaggaaaattattttggggaggaactacacagtcgtgattagaatttatctgatggttttgtattataacttgtaagacctgccagaatgctagtcccgagagtgtcagacaaggaagaagtccctgggcctcttc

SEQ ID NO: 1170 - DNA, 240 bp, Homo sapiens
ccaggtttctgcccacattggacccacatgaggacatgatggagcgcacctgccccctggtggacagtcctgggagaacctcaggcttccttggcatcacagggcagagccgggaagcgatgaatttggagactctgtggggccttggttcccttgtgtgtgtgtgttgatcccaagacaatgaaagtttgcactgtatgctggacggcattcctgcttatcaataaacctgtttgtttt

SEQ ID NO: 1171 - DNA, 59 bp, Homo sapiens
ccaacatggtgaaaccccgtctctactaagaatacaaaaaattagctgggtgtggtggt

SEQ ID NO: 1172 - DNA, 304 bp, Homo sapiens
ccaagtaagctgtgggcaggcaagcccttcggtcacctgttggctacacagacccctcccctcgtgtcagctcaggcagctcgaggcccccgaccaacacttgcaggggtccctgctagttagcgccccaccgccgtggagttcgtaccgcttccttagaacttctacagaagccaagctccctggagccctgttggcagctctagctttgcagtcgtgtaattggcccaagtcattgtttttctcgcctcactttccaccaagtgtctagagtcatgtgagcctcgtgtcatctccggggtgg

SEQ ID NO: 1173 - DNA, 236 bp, Homo sapiens
ctgtgacggcttggagaaacagtgtaaactggcagtgtaaacaaaagcagggcatgtatgagtagttgagaatggtgaataggagtatgactagacagaagatagtagggatgacaagttatttgggggcacagtctaagtttgtctggtgtctggaatgaggctggggcctaataaaaaggaacgtctatacaggagctcaaatgggctgtaccttgtagcattctgaggacagg

SEQ ID NO: 1174 - DNA, 302 bp, Homo sapiens
caggtccacatatgcccctgtcatctctgctgagaaagcctaccacgaacagcttactgtagcagagatcaccaatgcttgctttgagccagccaaccagatggtgaaatgtgaccctcgccatggtaaatacatggcttgctgcctgttataccgtggtgacgtggttcccaaagatgtcaatgctgccattgccaccatcaaaaccaagcgtaccatccagtttgtggattggtgccccactggcttcaaggttggcatcaactaccagcctcccactgtggtgcctggtggagacctgg

SEQ ID NO: 1175 - DNA, 154 bp, Homo sapiens
cgcaaaactaaccccctaataaaattaattaaccactcattcatcgacctccccaccccatccaacatctccgcatgatgaaacttcggctcactccttggcgcctgcctgatcctccaaatcaccacaggactattcctagccatgcactact

SEQ ID NO: 1176 - DNA, 435 bp, Homo sapiens
aaaagcaacatgtttttataagaaaattgttataaatgaaaaacgtgacttcttgaagacagttttgaatgtctaaaaatgttgttatcactactgagaggaaacttgcctatgaaaaatattataatgagtttgtggaaaaaagttaacaggttaaatattttaagccatttaactatagcataatattagtcatctgagcactttcagtatcactcttattttattaaatttatccaatttattaatagaaactaggccctgattggcagttctgttattactaatggttcaagttttctatttacacagattttaagatttaatttctcgaacaacagtctcttgattaggagtttcgtcttcttcaaaggttgggttgtcaacatgaggaataacatccactgccacagaatttgcttcatggtttaccag

SEQ ID NO: 1177 - DNA, 267 bp, Homo sapiens
ctgaggaagctcttcattggagggttgagctttgaaacaactgatgagagcctgaggagccattttgagcaatggggaacgctcacggactgtgcggtaatgagagatccaaacaccaagcgctccaggggctttgggtttgtcacatatgccactgtggaggaggtggatgcagctatgaatgcaaggccacacaaggtggatggaagagttgtggaaccaaagagagctgtctccagagaagattctcaaagaccaggtgcccac

SEQ ID NO: 1178 - DNA, 236 bp, Homo sapiens
aaaagtagtattaataaaggcttcaaaactccaaagtaattttctggtaagaatttcaagtactatatcagaaagtataaaactgtttcaaacagaaaaaaaaaatccttaagccccccaaaaatggaaactatgaaaatctgtgtccccaaaatatatgcaatagtgcaagactttccctcaaacatggaagacctcattcaaagggggaaaaagggacagattttactcatatt

SEQ ID NO: 1179 - DNA, 316 bp, Homo sapiens
cctttgtccggcaccctgcccacaggctgagctcagccccaggccctttcaggcatctagacactcccatagcctgtcaggctggggcaaggagatcccaggtcacacatactccttggaagagttggacttagggtaagagcggggtgcacggtacccagccttgctctcattcccaggacaggaacaggagagtagtgcacctcccaggatgactagggcagaccctgcccagccaataaagatggcagggccaaactcatacttaatgttggtagggatcaaagggttataaaagtctgtgacaatctgatgg

SEQ ID NO: 1180 - DNA, 391 bp, Homo sapiens
  misc_feature 339: n = A,T,C or G
aaagcggatctttcctctttgggccatgggtggatttcctgctcaagcaaccttcatctcttaagctgtgttgcctggaatctggactttccattcaagctggggcccatcaatcactcggcggctcctctaatgtcttaatcatcctgaaatgcctctgccggccgcattacgtgcctaaatccaaatcatgcctcgactctttccagaaccctctgtcgccatgctagcgtccacagacctgctcccttgaacacctcctctgagattcactgtccacgcactgtgcttttcctggcttggtcggttcctgtgttcacgtacttcctggctttgcancttggcactggagctgagtctgaaccccagccttaccctgaagtagttacgt

SEQ ID NO: 1181 - DNA, 604 bp, Homo sapiens
  misc_feature 550, 563: n = A,T,C or G
ccagcccaaacagtgtattaatcattagcaaatggaactttaaggagtccttatcattaaggtagtacaagtatttatattgtaaaactgatgtgtagcttgatctttaggggacaggaccaccaaccaatacatgcagattttgtgtgtggacagaaggtacttttgacattcagttttgctatatagaaacagaatgaataaatgaacttttttcttttttcttttttttgcaagaggtaagtaaaagattcaatttgattcttctagaggggggaaaaaggagttgaaagtaggtcttcattttgcagtcatcatctgtacgaattcttcatagttgacttgtccgtctccatcaatatctgcttctctgatcatttcatctacttcttcatctgttagtttttctcctaagtttgtcatgacgtgacgtagttctgctgcactgatataaccattgccatccttgtcaaagactcggaatgcctcacggatttcttcttcactatctgtatctttcatttttctagccatcatagtcaaaaattcnggggaagtcaatngtgccattaccatcagcatccacttcattgatcatatcctg

SEQ ID NO: 1182 - DNA, 601 bp, Homo sapiens
cctgctgggcttggcaacgagggactcggcctcggaggcgacccagaccacacagacactgggtcaaggagtaagcagaggataaacaactggaaggagagcaagcacaaagtcatcatggcttcagcgtctgctcgtggaaaccaagataaagatgcccattttccaccaccaagcaagcagagcctgttgttttgtccaaaatcaaaactgcacatccacagaacagagatctcaaagattatgcgagaatgtcaggaagaaagtttctggaagagagctctgcctttttctcttgtaagcatgcttgtcacccagggactagtctaccaaggttatttggcagctaattctagatttggatcattgcccaaagttgcacttgctggtctcttgggatttggccttggaaaggtatcatacataggagtatgccagagtaaattccatttttttgaagatcagctccgtggggctggttttggtccacagcataacaggcactgcctccttacctgtgaggaatgcaaaataaagcatggattaagtgagaagggagactctcagccttcagcttcctaaattctgtgtctgtgacttt

SEQ ID NO: 1183 - DNA, 446 bp, Homo sapiens
  misc_feature 328, 385: n = A,T,C or G
ccagatttctggcacttgtagcaagctcctgtgggaggaggttctggaggaacgcctggctgctgcggttcaggtgtttggaagttcttgtttgctggagatgtggctggggtttgtctcacagtggaggcaaggaattgcaactttttttttttattattgtacaccttgaaggcgaggttaattaaatcctgttgtggagtttgagggccggaatttaatttttggagttttatttaatatcgggagcagattgggtaataaaatgtatattgagaataagacggccttttgaccttttagggtctagggctgtaaagtgtctcanggttgctgccgaacgagccatgaactgggctgggtttttatatttgatgaaaaagancctaaacgcttctgatttgggataaagaaaaaggagcattaaccttgactatgtctttagc

SEQ ID NO: 1184 - DNA, 423 bp, Homo sapiens
  misc_feature 384: n = A,T,C or G
aaaaatcaggcaagttgtctgtaacatttttcaataatctgggaagcactgcaatccagtgtacgatgtgctgattagtgttgtctttgttggcactgacccaccaagggaatgacatgtacgatgaagaaaaagtgaaatacactgtgttcaaagtattgaagaactcctcgcttgctgagtttgttcagagcctctctcagaccatgggatttccacaagatcaaattcgattgtggcccatgcaagcaaggagtaatggaacaaaacgaccagcaatgttagataatgaagccgacggcaataaaacaatgattgagctcagtgataatgaaaacccttggacaatattcctggaaacagttgatcccgagctggctgctngtggagcgaccttaccccagtttgataaagatcatgatg

SEQ ID NO: 1185 - DNA, 389 bp, Homo sapiens
  misc_feature 209, 216, 228, 242, 260, 287, 305, 353, 355, 382: n = A,T,C or G
aaactccaaatgctgcagatgaaagtaaatacaacaaatgcaagtaaatacaacaaaataacaataaaatcacttgtgtgctgacttgctggattctggttaagcacagatgggatgttcctgatattcactaagaagagtctaactaatggctactgtgtgtgtgtcagtagcccagggttttttttttttttttttttttaaggganaacctancattttatttanatcttcattaaacngttggaattgagaaccanacatacgtaataaacctccaaaaatanatcctgaaaggcactttntgcttagggcaagcagtcatggaataagcatgtaaacaagctggcttntntgtaccacaccagccaagtcagctttntccatgg

SEQ ID NO: 1186 - DNA, 309 bp, Homo sapiens
ccaccatctcgcgctccttgcgttcggggaagccgtagtctggcgggaaggttggctgtttttacatctaaagcaatagactagaactgaattatcttctacatagtaaaatcacaattgtggaattacaggaattctggtgatattaaggtgaaataacaaaacacaaaaggccctattttaacagttgatgtgacagtaagttttaatagaacctgtaacttcattttggaaatgcttctccaccaaataagggctttttcccctatttaaggagccagatggattgaaagatgtggaaataggcag

SEQ ID NO: 1187 - DNA, 277 bp, Homo sapiens
atcacatctccccaaaatcatctaagagacatatttacacaagttctgaccatgctaaaaaattcatgaatgtgatggtgtataaagcatttggtacatgatgatacttgctttccagaagctggcatttgcatattataaaacgttaagaagaaggctgacctcggaatgtaacagacaatagttttatgtttcttctcaatatacagtgacctggaaggactccctgttgttaaaacctgcttccccactgctcagcctgccatcagccatccag

SEQ ID NO: 1188 - DNA, 67 bp, Homo sapiens
caggctgccagccccccagtccagccctctcccttccactggtgccttgcttagagccagaagggat

SEQ ID NO: 1189 - DNA, 423 bp, Homo sapiens; identical to SEQ ID NO: 879

SEQ ID NO: 1190 - DNA, 279 bp, Homo sapiens
  misc_feature 1, 35, 126, 186, 229, 269: n = A,T,C or G
nccagctcgatgaaactccgtctctactaaaaatntaaaaattagcagagcacagtggcacctgcctgtaatcccagctactcaggagggtgaagcatgagaactgcttgaacctgggaggcggangttgcagtgagccgagattgtgccactgccctccagcttggacaatagagcaagatttcntctcaaaaaaaaagagaaaaagaaaaccattattttgcaatanccaatgttataatctacacaggcacagactatcaatgctnaaaatcattt

SEQ ID NO: 1191 - DNA, 580 bp, Homo sapiens
  misc_feature 561, 571: n = A,T,C or G
cctacttctgcttcctcaggacaacttccccacctctgtcctgggaccacctgcccgcctgggcctgcagtgactaaggacgctgctcccactccaggggccagtgacagagagcagctatacagagggcccaccccgcaggatccttgacaggagctgagacagaacaaactgctgcttgtctccctaccctgggggctgtgatattcttggtaacatctctgagctggtctgtgaggtcacttcctcttttaacactgttgaggagactccaaaccctgtcttttcctcgtcttctcatgtcgattgggcaccagccattctcaggcaccagagcacagccccacacgggtgccccatcagacagggctgcccacagcagcctcctacacctgaactgggtttctctgcacactcacagccgtctcaccagctcaatgagctgctggatgtttttgttttggttcgacaagccgttcctgatgttttcgagtaggcatctcttcaattcaaatatggcttcactgtaggccaagctcactgcggccatgggaggtgctncgtgccacangacctcggc

SEQ ID NO: 1192 - DNA, 269 bp, Homo sapiens
ccacactcttcaagatcctggcgtccttctacatcagcctagtcatcttctaaggcctcatctgcatgtatacactgtggtggatgctacggcgctccctcaagaagtactcgtttgagtcgatccgtgaggagagcagctacagcgacatccccgacgtcaagaacgacttcgccttcatgctgcacctcattgaccaatacgacccgctctactccaagcgcttcgccgtcttcctgtcggaggtgagtgaaaacaagctgcggcag

SEQ ID NO: 1193 - DNA, 396 bp, Homo sapiens
ccttcctcccttccagcactggggctcaacagtggactgagtgtttggtagtgtacatttccaatcttaatagagcaaagccagacttctgctttgatgactgagctacagggacaggagtggtccaaggttctcaaattctgtttttgtttttttccagacttctatactattgtctgccctaggctgtagggaatgctggttagtttgctgaacagacactgtgttcagcagggtttgtggtatctcaaatcccaggtctcagccaaagctttgcagttcaccctgactccagggaacagggcctcctttcgaggtgaggcacttgggttcttgcccttgcttcttcccagtgagaactgtttcctcctacttctacaagcattgcactgccag

SEQ ID NO: 1194 - DNA, 341 bp, Homo sapiens
ccaccaattggatccaggagaaagtgtggctctctcaggaggtggacaaactgagagtgatgttcctggagatgaaaaatgagaaggaaaaactcatgatcaagttccagagccatagaaatatcctagaggagaaccttcggcgctctgacaaggagttagaaaaactagatgacattgttcagcatatttataagaccctgctctctattccagaggtggtgaggggatgcaaagaactacagggattgctggaatttctgagctaagaaactgaaagccagaatctgcttcacctctttttacctgcaatacccccttaccccaataccaagaccaaa

SEQ ID NO: 1195 - DNA, 423 bp, Homo sapiens
ccaccaatggtactgaacctacgagtacaccgactacggcggactaatcttcaactcctacatacttcccccattattcctagaaccaggcgacctgcgactccttgacgttgacaatcgagtagtactcccgattgaagcccccattcgtataataattacatcacaagacgtcttgcactcatgagctgtccccacattaggcttaaaaacagatgcaattcccggacgtctaaaccaaaccactttcaccgctacacgaccgggggtatactacggtcaatgctctgaaatctgtggagcaaaccacagtttcatgcccatcgtcctagaattaattcccctaaaaatctttgaaatagggcccgtatttaccctataacaccccctctaccccctctagagccaaaaaaaaaaaaaaaa

SEQ ID NO: 1196 - DNA, 314 bp, Homo sapiens
catgaatgtcctggcagatgctctcaagagtatcaacaatgccgaaaagagaggcaaacgccaggtgcttattaggccgtgctccaaagtcatcgtccggtttctcactgtgatgatgaagcatggttacattggcgaatttgaaatcattgatgaccacagagctgggaaaattgttgtgaacctcacaggcaggctaaacaagtgtggggtgatcagccccagatttgacgtgcaactcaaagacctggaaaaatggcagaataatctgcttccatcccgccagtttggtttcattgtactgacaacctcag

SEQ ID NO: 1197 - DNA, 71 bp, Homo sapiens
aacgagttcatcctgcagcccatccacaacctgctcatgggtgacaccaaggagcagcgcatcctgaacca

SEQ ID NO: 1198 - DNA, 408 bp, Homo sapiens
cctcactttttggagccaccttagctggtgcctaggcagaggggcagtcagcagtggttatcaggatcctggctctatgggttgccttcctcctggtctgtaaagcccctgcaggcagggacttcttagatagctgcttccttagggcatggcatgtagtgggtggttaatgaatggaagagagggaatgagtgatcaagggagggaggagggagtggagtggagatttctcatcctttcctgttaatttatgacatcctcctgcctatgagtccttgactctggagttttacaaagcagtcacatttcaaataaaagtctgggaaagcaacacatcatcgccaacttttaattttgctaaataaggatattagaaaaagaatagaaaattgcagtcccttactgttt

SEQ ID NO: 1199 - DNA, 514 bp, Homo sapiens
gtagtttcttcatttcaggaagactgacagttgttttgcttcttccttaaagcatttgcaacagctacagtctaaaattgcttctttaccaaggatatttacagaaaagactctgaccagagatcgagaccatcctagccaacatcgtgaaaccccatctctactaaaaatacaaaaatgagctgggcttggtggcgcgcacctgtagtcccagttactcgggaggctgaggcaggagaatcgcttgaacccgggaggtggagattgcagtgagcccagatcgcaccactgcactccagtctggcaacagagcaagactccatctcaaaaagaaaagaaaagaagactctgacctgtactcttgaatacaagtttctgataccactgcactgtctgagaatttccaaaactttaatgaactaactgacagcttcatgaaactgtccaccaagatcaagcagagaaaataattaatttcatgggactaaatgaactaatgaggataatattttca

SEQ ID NO: 1200 - DNA, 245 bp, Homo sapiens
aaatgagattcgttattgttgcttttatgtgaatccttagtacatggcctgctgcaaacacccaggacaccgaggaaatggtcgttgctgtttgattttcctcatccccagtctcaaggggaagccaggccaatgagaagagccacttgccatcaggctgtccctttaggagtcactgaaagggccccagggtgggatggtggggagataagaaccacgagagaagttggcacaaaggagttatg

SEQ ID NO: 1201 - DNA, 190 bp, Homo sapiens
ctgaaaacagtgggaggccagatgctggcgtcttccaggcgggaacgtagccatgatcactctagggccgatgtctcctggggctctccggcaggacaagacaggtgcaccggtactgtgcaatcccagttttacttagagccacctcttgtttgggggggcattagtcctcatttcatgccagattttc

SEQ ID NO: 1202 - DNA, 552 bp, Homo sapiens
ctgtttcaaagttggggtctgttcttgaatcctctattaattactgtgtgtgagccagagggagctgtggtaagggttgggcccccagcctgtagggaactttctggactcccactctttgaatcgatataggcatttggtctcactacttgaccattctcaccctgtgaaacgtcccacactttgaagcaaatacaattcacagcacagtacacacaaaaaccttggcataagacagagaaggttcttcttattttgtgggctggttgctgtagaaacacataacaaagggcagccctccacttctggtataattgtgtagccccttttctttgggcttgacacctgtcttgaataagagtgattagagctgcataatgtccctctcttggctattgaccatgtggttcacgtacaaaactctgtataagttgaaggaaaatgttcatgttcatatgtacttgtttgctatgactacattttgaggttttgtaaaactgttattttttttttttcacaatgtgaaactgaaggtcaataaattattagaga

SEQ ID NO: 1203 - DNA, 373 bp, Homo sapiens
aaaaagtacatctctctccctcctcccccacatgcacaaggctcacatctcattatggtgcggcccatgtacattaaagtgtgatacttggttttgaaaacattcaaacagtctctgtggaaatctgagagaaattggcggagagctgccgtggtgcattcctcctgtagtgcttcaagctaatgcttcatcctctctaataacttttgatagacaggggctagtcgcacagacctctgggaagccctggaaaacgctgatgcttgtttgaagatctcaagcgcagagtctgcaagttcatcccctctttcctgaggtctgttggctggaggctgcagaacattggtgatgacatggaccacgccatttgtgg

SEQ ID NO: 1204 - DNA, 479 bp, Homo sapiens
ctgttgctggaagacatggcggttgtggaaatgacccaagcaaagcggttctgctttctggctggtagttctgagtgtctcgttgctgccaggctgttgagagggttcagcacccagggtcttgtgctgcttattgccaggtgcactcagagagacattctgaagggaaccctgcaagttgcctgttgttgttcttcccaggggaggactgagcatacaaccactgcttcccaagggaggcttttcccacaaagggggcacagcagtctcctgtccattttttactggtggacccaccatggctgttgcctcctcaggtagactgatgcctgataacccattggcactgagtttccccagtgatgctgcctgcagcagtgcatccatcttcttcctagtttcctcttttgtgagagccagctctctcttcaggagctcggcgccatgccaatgctgccattctgtaaagcagtgtcgga

SEQ ID NO: 1205 - DNA, 456 bp, Homo sapiens
ctgtgatgtcttggagaaacagtgtaaaccggcagtgtaaagaagagcagggcatgtatgagtagttgagaacggtgaacgggagtatgactaacagatgaggatgaaatttgggcttcactgaagtaatgggggctgtctgtgaagccttgtggcagtgcagcccaggtaatttgttgagcctaatgggtgtcagggtcagtctaagtgaaggcaaagagaggctgggatgaagggtgcaaagcaatagtaaagaaagcatgtctgagatccagaacagaataatgggtagtagagggaggtattgaggataggagagtatatgggtttggcaccacggggtggataggcaaaacaatttggttgataaggcgcagatcctgaactaacttgtaaggcttgtctcgttttaggacaggaaaaatgggggaattgtaaggagagtttatagggttt

SEQ ID NO: 1206 - DNA, 520 bp, Homo sapiens
aaatacattttcaaaattatctattactaggtccactggtctccacataatgaaactattctggcttcaagtggtactgaccgccgcctgaatgtgtgggatttaagtaaaattggggaagaacaatcagcagaagatgcagaagatgggcctccagaactcctgtttattcatggaggacacactgctaagatttcagattttagctggaaccccaatgagccttgggtcatttgctcagtgtctgaggataacatcatgcagatatggcaaatggctgaaaatatttacaatgatgaagagtcagatgtcacgacatccgaactggagggacaaggatcttaaacccaaagtacgagaaatgtttctgttgaatgtaatgctacatgaatgcttgatttatcaagcgccaaaaaggcattgtatagtaggaaatgtaagtggggtggcttatggcttctttatcctctgattctagcactttcaagtgagctggttgcgtactgtatcatattgtagc

SEQ ID NO: 1207 - DNA, 375 bp, Homo sapiens
aaagaaggtaaaattggaaaaaaaaaaaaaaaagaatttttttttgttttaattaaaacctctccttacaaaataaataattttagcaagtggaatgtcttgaaggttaactgctggtgttctgagaggcacaggtgacagagcgagcaggcatctgccttccacatggggcccaggcaggcaaccgggggcagtgtgctcgggcacttattggctgctgaaacattcccagaacagatttcatctcctttgcttgccttttacctctttcttaagactgcagtgaacaagcaaaggcaggaggaaatgcactaaaagagtgcaaatgtttcccagcagcaccgttttaaggctcaaggtgtttttctcttcttt

SEQ ID NO: 1208 - DNA, 454 bp, Homo sapiens
cctgacattcctgccttcttatattaataagaaaaataaaacaaaatagtgttgaagtgttggggcggcaaaaatttttgggggtggtatggagagagaatgggcgatgtttctcagggctgcttcaagcgggattaggggcggcgtgggaacctagagtgggagagattaagctgaatggaagatcttgtggtaaggggtgatattgtggggttgttagaagaaacatttgtcgtatagaatgattggtgatggcctggatacggttttgtatgaattgaaaaatggaataagagaaggagagaaacaggtataaaaggtctaagaattgggaggacctaggacatctgattagagtgcctaaggagattcggcatagtcctgccagcaaagattatttatttacttcaagagtttagagtggcagtttggggatagcaccaggagatatcag

SEQ ID NO: 1209 - DNA, 324 bp, Homo sapiens
  misc_feature 43, 178, 209, 264, 282, 286: n = A,T,C or G
aagctttttttttttttttttttttttttttttttggataagngctttatttttatattctctatgaaaacatcaataattaagcccctttgttctaagccagaaacactgtaaaactaccattaaacaaggcagtatgccttacaagaaagacataaaatgtccaagggatatttanaacattttagttcttaaagtttcaacatganaaatgttgaccacacactgggaaatcatttcaataaataacaactgacattcatntaaacagttacaaaacanatgngcacatacattcccctgccttcacaatgatctcattgg

SEQ ID NO: 1210 - DNA, 535 bp, Homo sapiens
ggaagaaatcgatgttgtttctgtggaaaagaggcaggctcctggcaaaaggtcagagtctggatcaccttctgctggaggccacagcaaacctcctcacagcccactggtcctcaagaggtgccacgtctccacacatcagcacaactacgcagcgcctccctccactcggaaggactatcctgctgccaagagggtcaagttggacagtgtcagagtcctgagacagatcagcaacaaccgaaaatgcaccagccccaggtcctcggacaccgaggagaatgtcaagaggcgaacacacaacgtcttggagcgccagaggaggaacgagctaaaacggagcttttttgccctgcgtgaccagatcccggagttggaaaacaatgaaaaggcccccaaggtagttatccttaaaaaagccacagcatacatcctgtccgtccaagcagaggagcaaaagctcatttctgaagaggacttgttgcggaaacgacgagaacagttgaaacacaaacttgaacagctacggaactct

SEQ ID NO: 1211 - DNA, 395 bp, Homo sapiens
gcgatccgagccgggacgggctgcaggcgggggtgctgcagaggacacgaggcggcgggctggagacatggaccgcggcgagcaaggtctgctgagaacagacccagtccctgaggaaggagaagatgttgctgccacgatcagtgccacagagaccctctcggaagaggagcaggaagagctaagaagagaacttgcaaaggtagaagaagaaatccagactctgtctcaagtgttagcagcaaaagagaagcatctagcagagatcaagcggaaacttggaatcaattctctacaggaactaaaacagaacattgccaaagggtggcaagacgtgacagcaacatctgcttacaagaagacatctgaaaccttatcccaggctggacagaagg

SEQ ID NO: 1212 - DNA, 463 bp, Homo sapiens
  misc_feature 38, 129, 168, 206, 217, 250, 262, 288, 303, 314, 323, 332,363, 365, 381, 425, 443: n = A,T,C or G
tttttttttttttttttttttttttttttttaaggggngcacttttattcaactggtctcaagtcagtgtacaggtaagccctggctgcctccacccactcccagggagaccaaaagccttcatacatntcaagttgggggacaaaaaagggggaagggggggcaccnaaggctcatcattcaaaataaaacaaaataaaaaagtnttaaggcgaanattaaaaaaattttgcattacataatttacacnaaagcaatgctntcacctcccctgtgtggacttggganaggactgggccattntccttaaaaanaagtggggnggcttttangatggcaagggacttcctgtaacaatgcatntnatatttggaatgactnttaaaaaaacaacaatgtgcaatcaaagtcctcggccacattgngaactttgggggatgctngctccaaccgactggtgtca

SEQ ID NO: 1213 - DNA, 359 bp, Homo sapiens
cctagggggcatatcaagggtttaatagactgggggaatgggcaacagaactggctaccttagaggctctggaatgccccccacccatccacccaccaatggaaggaaagtcaggcatcgcctaaaaggagtggtccctatctagccccaagtctggagcagaaagggcaggtccattctggcccaagtgacattgttagatcctgtcccctcccccaatcactgctgcttgccagggtgcctcttcacagttcccatgtggcagcagtagtggcagaggcagaagtggacttattgtagattgcagtacagatacatggacacaatcatggcagccagctcgaggcccccaattccag

SEQ ID NO: 1214 - DNA, 595 bp, Homo sapiens
  misc_feature 574, 578, 582, 588: n = A,T,C or G
tgcatatcagttgagcttcatataccagcaatatatctgaagagctattatataaaaaccccaaactgttgattattagccaggtaatgtgaataaattctataggaacatatgaaaatacaacttaaataataaacagtggaatataaggaaagcaataaatgaatgggctgagctgcctgtaacttgagagtagatggtttgagcctgagcagagacatgactcagcctgttccatgaaggcagagccatggaccacgcaggaagggcctacagcccatttctccatacgcactggtatgtgtggatgatgctgccagggcgccatcgccaagtaagaaagtgaagcaaatcagaaacttgtgaagtggaaatgttctaaaggtggtgaggcaataaaaatcatagtactctttgtagcaaaattcttaagtatgttattttctgttgaagtttacaatcaaaggaaaatagtaatgttttatactgtttactgaaagaaaaagacctatgagcacataggactctagacggcatccagccggaggccagagctgagcactcagcccgggangcangctncagganctcggcc

SEQ ID NO: 1215 - DNA, 354 bp, Homo sapiens
agtcagtgccctgtatgctctccaggtgcactgctataacagcaacttcccaaaaggcatgttacttcgcttttttgtgcacttctatgacatggaaattattgaagaagaagctttcttggcttggaaagaagatataacccaagagtttccgggaaaaggcaaggctttgttccaggtgaatcagtggctaacctggttagaaactgctgaagaagaagaatcagaggaagaagctgactaaagaaccagccaaagccttaaattgtgcaaaacatactgttgctatgatgtaactgcatttgacctaaccactgcgaaaattcattccgctgtaatgttttcacaatattt

SEQ ID NO: 1216 - DNA, 505 bp, Homo sapiens
aaagtaaaaatttccagatgcctcaaaagcagtgagttcaatttggtgtcttgtgttctggcaaagaacagttaagtttacagcactgcagtcacagttttcaaatgctgtgaccaattatttgagagttataatctgcaggctccattttcaaaatatgtgggataacactgtcaattcgtatattgccaatgagacctttgaaaaacaattcttcagtgatggtagcattcatcagtcttaaagctggcaatctgagtagtagtctggataacctgtaggtgtcatctggatatgttttggttatataatcttggaattccacataagccttttcctgaaatttctctatctgttccatgttttctaggcttggatgatctggacagaagagtactattgccttcaggtaggcatattcgtatccatcaatgcagagtttaaccatgctgttacaaaactcctgtagtttgaagatgtgctccatcaataattttcttctttc

SEQ ID NO: 1217 - DNA, 458 bp, Homo sapiens
ctgatatctcctggtgctatccccaaactgccactctaaactcttgaagtaaataaataatctttgctggcaggactatgctgaatctccttaggcactctctaatcagatgtcctaggtcctcccaattcttagaccttttatacctgtttttctccttctcttattccatttagtttctcaattcatccaaaaccgtatccaggccatcaccaatcattctatacaacaaatgtttcttcttacatccccacaatatcaccctttaccacaagacctcccttcagcttaatctctcccactctaggttcccacgccgcccctaatcctgcttgaagcagccctaagaaacattgcccattctctctccataccacccccacaaaaattttcgccgccccaacacttcaacactattttgttttgtcttattaatataagaaggcaggaatgtcagg

SEQ ID NO: 1218 - DNA, 505 bp, Homo sapiens
ctgcaggaagaggtggaggggggcctgtcattatgtttcccccccaccccccaacgaaaggaaaactaagactcccaacataaacagggccttgaggggggggattacaggcacttgggcatggagtcttcggctgcaggaagcactccgcttattcttcaggaatgggaaaggcgtgacccaacgagagcatctgtctcagagctccactcagggtcacccctctccagaggccggtatggggtggcttcagacttccactgcacgacctggagcaccaagaccacacaccacaataccaaattcacccaagaagaggtttcagcattgtgtaggttggagtaaaactgcagagcagttccagggggtgtccatggaattttctgggcttcagaacagctaattgtagtgttcaaggagatgatggagttgcagagagacctggtgccaaatcgaaggatacaggcagacaccaagaccaggaagacggctatagctgagatgg

SEQ ID NO: 1219 - DNA, 363 bp, Homo sapiens
ccactgacaaaaatgacccccatttgtgtgacttcattgagacacattacctgaatgagcaggtgaaagccatcaaagaattgggtgaccacgtgaccaacttgcgcaagatgggagcgcccgaatctggcttggcggaatatctctttgacaagcacaccctgggagacagtgataatgaaagctaagcctcgggctaatttccccatagccgtggggtgacttccctggtcaccaaggtagtgcatgcatgttggggtttcctttaccttttctataagttgtaccaaaacatccacttaagttctttgatttgtaccattccttcaaataaagaaatttggtacccaaaaaaaaaaaaaa

SEQ ID NO: 1220 - DNA, 229 bp, Homo sapiens
aaactaacatgccccaaacagatgagacctcccaacttgaaaggatccctgcaccacaatgcaatgtttaagtacctgtgacaggcttctatgtcaaacaaacaggatgctctggttcttgtccattttcctagcttattacgataaagaatttctgatgattcccatgtttgacggtcgtccgaactgtccttagtagggcaggaagtttctgaagtgacatctttgg

SEQ ID NO: 1221 - DNA, 460 bp, Homo sapiens
ctgatatctcctggtgctatccccaaactgccactcttaactcttgaagtaaacaaataatctttgctggcaggactatgctaaatctccttaggcactccctaatcagacatcctgagtcatcccaattcttagaccttttatacctgtttttctccttctgttattccacttagtttctcaattcatccaaaaccgtatccaggccatcaccaatcattctatacgacaaatgtttcttctaacatccccacaatatcaccccttaccacaagacctcccttcagcttaatctctcccactctaggttcccacgccgcccctaatcccgcttgaagcagcgctgagaaacatcgcccattctctctccataccacccccaaaaattttcgccgccccaacacttcaacactattttgttttatttttcttattaatataagaaggcaggaatgtcagg

SEQ ID NO: 1222 - DNA, 315 bp, Homo sapiens
ctggccgacaagactgttttattgcaggtgcgttctcttgagagcgtggtggggcccatcttccctctccccaccctttagctagcccagcatggttctgaacaaaatgaaagtcttaagggccatagaggggaaagaaaaaaaaagagaaccagcacattacaaagcgaccatccccacatccattcctaggacgggccctcagggcggtgggtgcatcgtgaggagggagcggcatgggatgttagcaccaggtatttacagaacagctcgagagcgcttcaggaacgcgggcaagtccaatctgcagagtgg

SEQ ID NO: 1223 - DNA, 524 bp, Homo sapiens
  misc_feature 509: n = A,T,C or G
aaaaagctgggcatggtggcatatacctgtggttccaggtacctggagggctgacgtaggaggattgcctgagcccagcaggccgaagctacagtgagctgtgattgtgccactgcactccagcctgggcgaggagagcaagactctgtctcaaaaataaatacataaaatacagcgtccaaaagtgtgtcatcttctttctcttcacaattttataataagggggtaaaatgcctgtgagtctattcattatggaaaataaaaaagaaacaaccatttaaggctgaggcattttggttttctgctggcttttagattattaactgcattaagcccctcactataacttcaccagtatcctagaaacaatttgggtttcctttttaggcagggacaggaagtattcaaaggacagacatatggacagagttaggcccttcagggttgaagtctgtggtttcttgtgtctcaagactcaatgtcttgagaagttggtggaccctgtcctncatccaagaagtgct

SEQ ID NO: 1224 - DNA, 488 bp, Homo sapiens
ccacagaagttgctgctgacgctctgggtgaagaatggaagggttatgtggtccgaatcagtggtgggaacgacaaacaaggtttccccatgaagcagggtgtcttgacccatggccgtgtccgcctgctactgagtaaggggcattcctgttacagaccaaggagaactggagaaagaaagagaaaatcagttcgtggttgcattgtggatgcaaatctgagcgttctcaacttggttattgtaaaaaaaggagagaaggatattcctggactgactgatactacagtgcctcgccgcctgggccccaaaagagctagcagaatccgcaaacttttcaatctctctaaagaagatgatgtccgccagtatgttgtaagaaagcccttaaataaagaaggtaagaaacctaggaccaaagcacccaagattcagcgtcttgttactccacgtgtcctgcagcacaaacggcggcgtattgctctgaag

SEQ ID NO: 1225 - DNA, 64 bp, Homo sapiens
ctgtgctgtggagagaagctgatgttttggtgtattgtcagccatcgtcctgggactcggagac

SEQ ID NO: 1226 - DNA, 503 bp, Homo sapiens
ctcagagaaacaccaactgaaaagagccaggaaaacccgggaattttccaaaaggtcttcacgttaaacttgtcttatctcaggagagagcccgctcttgtctcccagttcctggtagggtctgcctgttggaaagtgtacctggatgcttctgggctccgtttggcaatagcaatcttggctgatgtgcacagtctggctcccagctcaccctttttttttaaagtaagaaaatagttgctaccgatagggactttgccaagtccaattatcttctaggattgaaaggtgcattttccccataaaaaaggcgaggaaaacccatggctgctttgtgtcacctcagtgacttacagtcccccttggcatttagttggtactagagccagtcatccttaacaaatcttttcacattttatttctttcacatgtagtcatcttcaaaaaggaaagatttggaattttagaaaaggggcaactcttctttttagcattctcatcag

SEQ ID NO: 1227 - DNA, 356 bp, Homo sapiens
caggaatgggctgagagtggtgtttgctttctccaccagaagggcacactttcatctaatttggggtatcactgagctgaagacaaagagaagggggagaaaacctagcagaccaccatgtgctatgggaagtgtgcacgatgcatcggacattctctggtggggctcgccctcctgtgcatcgcggctaatattttgctttactttcccaatggggaaacaaagtatgcctccgaaaaccacctcagccgcttcgtgtggttcttttctggcatcgtaggaggtggcctgctgatgctcctgccagcatttgtcttcattgggctggaacaggatgactgctgtggctgctgtgg

SEQ ID NO: 1228 - DNA, 154 bp, Homo sapiens
  misc_feature 58, 60, 62, 71, 97, 113, 130: n = A,T,C or G
aagctttttttttttttttttttttttttttttctttttttttttttttttttttttngnancccaaaggncctttattttttttttttaaaacctnttatgccatgaattcntagggaataggttccancagcccaggctccttcccattggt

SEQ ID NO: 1229 - DNA, 189 bp, Homo sapiens
aaatcaaatgataatttattctaagggtttttacaaaatacgaaaattttacatacataagaagaacagtataactgagcaacttacattctaattaaaactttgttgcaaaacatgtttgtgactactcttatgctgctttcatatagtaaagttataagaaaaacaatcatatatatgcagggtttt

SEQ ID NO: 1230 - DNA, 479 bp, Homo sapiens
aaatcctgagtcaagccaaaacaaaaacaaaaacaaaaacaaaacaaaacaaaaaataaagccatgccaatctcatcttgttttctgcacaagtcaggttttgtcaagaaagggtgtaacacaactaagtcacagtccgcctagaagcatttgaaggatggatgatggagccggactcatcatactcctgcttgctgatccacatctgctggaaggtggacagcgaggccaggatggagccgccaatccacacagagtgcttgagctcaggaggagcaatgatcttgatcttcatcgtgctgggcgccagggcggtgatctccttctgcatcctgttggcaacgctagggtacatggtggtgccgccagacagcaatgtgttggcgtaaaggtctttgtggatgtccacatcacacttcataatggagttcaaggtagtttcatggatgccacaggattccatgcccaggaaggaaagc

SEQ ID NO: 1231 - DNA, 325 bp, Homo sapiens
ctgagagtagacacttgtggtatgtggagtacagataagccaggggcaggccacggcacgctccatgaaagctaggagggagtgaaatatcagtgatcatcgcaaggaaggaggcagacaagagtaaggcacacctgactcttaggactagcagtcagaaccaggaggaaaggttttattgctatgcgggtaggtaagaacagattttacttacatccatatagttacttaaagtccagttttctgttaaacatttttcttaatatattgagccaaaactagtccagttaagctgaacttggtttttctggagatgaattgtttt

SEQ ID NO: 1232 - DNA, 316 bp, Homo sapiens
gtgacaggccgctgcggctctgtgctggtacgcctcatccctgcacccaggggcactggcatcgtctccgcacctgtgcctaagaagctgctcatgatggctggtatcgatgactgctacacctcagcccggggctgcactgccaccctgggcaacttcgccaaggccacctttgatgccatttctaagacctacagctacctgacccccgacctctggaaggagactgtattcaccaagtctccctatcaggagttcactgaccacctcgtcaagacccacaccagagtctccgtgcagcggactcaggctccag

SEQ ID NO: 1233 - DNA, 516 bp, Homo sapiens
aaaaagaatgacgtttacatataaaatgtaattacttattgtatttatgtgtatatggagttgaagggaatactgtgcataagccattatgataaattaagcatgaaaaatattgctgaactacttttggtgcttaaagttgtcactattcttgaattagagttgctctacaatgacacacaaatcccgctaaataaattataaacaagggtcaattcaaatttgaagtaatgttttagtaaggagagattagaagacaacaggcatagcaaatgacataagctaccgattaactaatcggaacatgtaaaacagttacaaaaataaacgaactctcctcttgtcctacaatgaaagccctcatgtgcagtagagatgcagtttcatcaaagaacaaacatccttgcaaatgggtgtgacgcggttccagatgtggatttggcaaaacctcatttaagtaaaaggttagcagagcaaagtgcggtgctttagctgctgcttgtgccgttgtggcgt

SEQ ID NO: 1234 - DNA, 218 bp, Homo sapiens
gctgtctagttttgtttttgttttgagatggagtttcactcttgttgcccaggctggagtgcaatggtacaatctcagctcactacaacctccgccttccaggttcaagcaattctcctacctcagcctcccaagtagctgggattacaggcatgcaccaccatgcctggctaatatttttttgtatttttagtagagatggggtttcaccatgttgg

SEQ ID NO: 1235 - DNA, 458 bp, Homo sapiens
gtggttgtcattgtgtgtctgtgtgtggttgtgtaactgtcatcgtgtggctgcatgactgggattgtgtggtttcgggaggtccgcgggtgtgcgtgtgctgtgcgtttgtgtgttgtgtgctcgtgtgtgtgctgtgttcgcgtgtgtgtgctgtgtgtgcatgtgtgtgctgtgtctttgtgtgtgtgctgtgtgctagtgtgctgtgtgtgcatgtgtgtgcgtgtgctgtgcgtttgtgtgctgtgtgctcgtgtgtgtgctgtgtgtgcgtgtgtgctgtgcgtttgtgtgtgctgtgcgtttgcgtgtgtgctgtgtgtgcatgtgtgtgcgtgtgtgtgccgtgcgtttgtgtgctgtgtgtgcatgtgtgtgcgtgtgtgtgctgtgcgtttgtgtgtgtgctgtgtgctcatctgtgtgctgtgtgtgctgtgcgtttgtgtgtgtag

SEQ ID NO: 1236 - DNA, 347 bp, Homo sapiens
aaaagctgttgaatgccctccacctcggaccacagccaggctccttgacaagcttgttggggagttcctggaagtgacttgcatcaatcctacattcatctgtgatcacccacagataatgagccctttggctaaatggcaccgctctaaagagggtctgactgagcgctttgagctgtttgtcatgaagaaagagatatgcaatgcgtatactgagctgaatgatcccatgcggcagcggcagctttttgaagaacaggccaaggccaaggctgcaggtgatgatgaggccatgttcatagatgaaaacttctgtactgccctggaatatgggctgccccccacag

SEQ ID NO: 1237 - DNA, 176 bp, Homo sapiens
ctgaggtggagactcgcaaggtggtgctgatgcagtgcaacattgagtcggtggaggagggagtcaaacaccacctgacacttctgctgaagttggaggacaaactgaaccggcacctgagctgtgacctgatgccaaatgagaatatccccgagttggcggctgagctggtgcag

SEQ ID NO: 1238 - DNA, 455 bp, Homo sapiens
aagaacctggattctgggcactgtgtcccggagcccagctcctcaggccagcgcctgtatcctgaggttttctatggcagtgctgggccttccagttctcagatctctgggggagccatggactctcaattacatccaaacagtggaggcttccgccctgggacaccctcactgcacccttacagatcacagcccctatacctacccccgggcccagcccctccctcagcactgctctctggggtagctctcaagggccagtttctggatttctccacaatgcaagctacagagctggggaagttgccggctggaggagttctctaccctccaccttccttcctctactctccggctttctgccccagtcctttgcctgacacatcgttgcttcaggtacgccaggatctgccatccccttcggatttttattctactcctctgcagcctggtgg

SEQ ID NO: 1239 - DNA, 505 bp, Homo sapiens
ccttttctctggctttcctcctttgccctgcagtagcaactggtgctgggacaagttgacccacctctcacagtcatgggtgtggcccacttgtgggagtctcctgcccacctcccagagacggccacccagcgggtctggcttcccagaaagttaactgatgattgtggggtttgtcatatctgggagggaagatgggtgctgggagagggttgggggcagggggcaaggaaaattgctacctgatttgttgaagatttttcctcttgccttacacatggaggttccaggaaacctcttgcagaacttcacacgtgattcttcaagccacacccacctgaaatcaaaccaaaggagtgctgtggctccccttgccctgccaccctttccctagtcttttgtagattgcactaatttacatcctagcaagaatcaacactgtatcagtccacggacctgctgagctgcagccacttgctctaggagctaaggacttgcattttca

SEQ ID NO: 1240 - DNA, 528 bp, Homo sapiens
ctgccggcatgggtgagtgggacccaggcctattacccggccagagggtttgggggcctctctcctggaagcctgctctttccacaccccctttcccagccaggctgtcttggacactctcggggctccgctgaggggcacatgattcccgctttggacttcttttgagatgtcattttaacactgaggcatcctggcctcccttcccggaagatgggttatttgcagtgctgtcttttcttttagtcccggtttttgtacaaaaacaatgatactccccattggactgtatttttgcccaagaaacaaaagtgcctcaacaggtacagttctgctggtcaatctgcttccggcagggctccatggtgacagccacgcccaccccactccggcccgatgtcattcgggtcacctcgctccaggtgtctgtatctgggtcgtaacactccacactgtccaggaacgtgtgaccatcatagcctccaaggacgtagattctcccctggtggacagtgatccccagggcac

SEQ ID NO: 1241 - DNA, 460 bp, Homo sapiens
ctgctcccaggatggtcgtgtgttcatttggacctgtggtgatgcctcaagcaatacgtggtcccctaaattgttgcacaagttcaacgatgtggtgtggcatgtgagctggtccatcacagccaacatcctggctgtctctggtggagacaataaggtgaccctgtggaaggagtcagttgatgggcagtgggtgtgcatcagtgatgtcaacaagggccagggctccgtatcagcatcagtgacagagggccagcagaacgagcagtgacaagacaggtggggcctggctccccacccgccagctccaggactgccccttcctgggccaactaaccagacaactgggaagagcccccaactccaacaggattattttcccaggaggagttacagatgcagccacagattgatcatctgccttaacgtgatcggagatgctttgtaatctactgtccag

SEQ ID NO: 1242 - DNA, 176 bp, Homo sapiens
ctgcaccagctcagccgccaactcggggatattctcatttggcatcaggtcacagctcaggtgccggttcagtttgtcctccaacttcagcagaagtgtcaggtggtgtttgactccctcctccaccgactcaatgttgcactgcatcagcaccaccttgcgagtctccacctcag

SEQ ID NO: 1243 - DNA, 380 bp, Homo sapiens
cctgcggcaccaccccatagagctggtgaggaagtaacttctgcttctcattgcaactgtagatccatcggggacgaacgaatgccagggaggggttgtccatcagggcctcctcaaagctgggatcccattcccgtgctgtgatcacaaactgaacccggtcactcatatagtcctcgagctccccattgaaggctgtggcgtatcggatgagtttccgccgctcgtccccagggaactccccgtaaagaaagaagtgcttgccctggaagaaatctgggagctcagggactggcagatcaggaggctcctggtgttcctcactgtccgtgttctcatccgtggagcctgcatacgggtcttccccattctcctcctgg

SEQ ID NO: 1244 - DNA, 532 bp, Homo sapiens
  misc_feature 502: n = A,T,C or G
aaaaaataattgagagttgtgacaacttcgattcttttcaggaggtgctgtcttaagatagaagaaagggatcaagctcttatcttagaaagcacagacacgtttagctcagggtagtgcaattcaatgctaagtggctgctccatgaaatctaagggccgggtaaggggaagaggcccagggacttcttccttgtctgacactctcgggactagcattctggcaggtcttacaagttataatacaaaaccatcagataaattctaatcacgactgtgtagttcctccccaaaataattttcctcttagaagtaaaatcaggaaaggggctgagttctgaaaagaaacatcggggctgtggcccaggccctctgagtgtggacgctgtcccccgtgtctccatgtttactgccttatcgtctcctttgtatgaaagtataatttacgtaattcgtccttggagaatcacagtggtgttcaagaaccttttgaggccatccangtttttgtccttcagtaccttgaaatcaga

SEQ ID NO: 1245 - DNA, 478 bp, Homo sapiens
aaagcctgacagaacagaaggcagtttatctcagcagtgaagggatggcagtaatgggatggcagtcagggtggaccagcagaatgggtgaagagatgtattggattggctgacttgctaatcggagctattcttttttttccccttttgaaatcaggtggagatgttacagccaaaaatatctggttggcagaaagtgttctggatatcctgacagagcaaagggagtgggtcctgaagagcggcatcctcattgccatggctgtttacacgtacctccgcctcatcgtggaccaccatgggactgcccagctccaggccctgcgacagaaggaagtagacttctgcatctcactgcttcgggaacggttcatggaatgtctgatgattggtcgggatctcgtaagactacttcagaatgttgctaggataccagaatttgaactgctttggaaagatattatccataatcctcagg

SEQ ID NO: 1246 - DNA, 479 bp, Homo sapiens
ctgaggaagctcttcattggagggttgagctttgaaacaactgatgagagcctgaggagtcattttgagcaatggggaacgctcacggactgtgtggtaatgagagatccaaacaccaagcgctccaggggctttgggtttgtcacatatgccactgtggaggaggtggatgcagctatgaatgcaaggccacacaaggtggatggaagagttgtggaaccaaagagagctgtctccagagaagattctcaaagaccaggtgcccacttaactgtgaaaaagatatttgttggtggcattaaagaagacactgaagaacatcacctaagagattattttgaacagtatggaaaaattgaagtgattgaaatcatgactgaccgaggcagtggcaagaaaaggggctttgcctttgtaacctttgacgaccatgactccgtggataagattgtcattcagaaataccatactgtgaatgg

SEQ ID NO: 1247 - DNA, 540 bp, Homo sapiens
aagcagcgagtcttgaagctctgtttggtgctttggatccatttccgtcggtccttacagccgctcgtcagactccagcagccaagatggtgaagcagatcgagagcaagactgcttttcaggaagccttggacgctgcaggtgataaacttgtagtagttgacttctcagccacgtggtgtgggccttgcaaaatgatcaagcctttctttcattccctctctgaaaagtattccaacgtgatattccttgaagtagatgtggatgactgtcaggatgttgcttcagagtgtgaagtcaaatgcatgccaacattccagttttttaagaagggacaaaaggtgggtgaattttctggagccaataaggaaaagcttgaagccaccattaatgaattagtctaatcatgttttctgaaaacataaccagccattggctatttaaaacttgtaatttttttaatttacaaaaatataaaatatgaagacataaacccagttgccatctgcgtgacaataaaacattaatgctaacactttt

SEQ ID NO: 1248 - DNA, 486 bp, Homo sapiens
  misc_feature 44, 95, 113, 138, 148, 151, 163, 197, 209, 239, 294, 313,388, 418, 425, 472: n = A,T,C or G
gtacaagctttttttttttttttttttttttttttttgctttgnatagtttattatacaaatgattgatagtaaaatagtgaattttaaagcttnttcctaacctttcattgngaatgaacagtgatgcagggagaanagacattcanaanaaaaatcatgtntgtattattaaactagaagtgataaaatgttcanaatgacaatgtntttaaaaaataataaccttgttggaattgnacatctatcattatcacaacatgcttatttgatgaagctaaagaaaagccagaanactaatatggctggatganaatagcattttaaaacattttcagcaaaattctaaaaatttgctgtttagttccaaaactgaatttcatacaagngctattattccaatagtttttttcaattgncactagngatcttgatccatatactgcaatcataatatccaaaataaaagagtntttcattaataaca

SEQ ID NO: 1249 - DNA, 240 bp, Homo sapiens
cctagctccaaccaagagtgtgctccagatgtgtttgggccctacctggcacagagtcctgctcctgggaaaggaaaggaccacagcaaacaccattctttttgccgtacttcctagaagcactggaagaggactggtgatggtggagggtgagagggtgccgtttcctgctccagctccagaccttgtctgcagaaaacatctgcagtgcagcaaatccatgtccagccaggcaaccag

SEQ ID NO: 1250 - DNA, 363 bp, Homo sapiens
ccagtgaagaggattcagagaaaataatacaaccatcaatcagaaaaaggaggggcgacaaaggaaaataattaggctgtagcctcaattgtgcattcccgtgcaaggtgccctgactcgccacagcggtaacagttgacttcacttgtcttgctgcagttgatggctacatgaccagtttcaccacacctatagcacttcactttggtgcagtctttttgaatgtgtccgaattctccacaagaatagcatttctgctcatctgcatggtcgcagtcacgagccagatggcctggtttgccacagttgtagcagcattgctctcgctctctcttgggctccttgcagtccttggcaatgtgg

SEQ ID NO: 1251 - DNA, 468 bp, Homo sapiens
ctgcagtcgcctagaaaacttgctcttaaacttcagggttttttcttccttcaaattttggaccaaagtctcatttctgtgttttgcctgcctctgatgctgggacccggaaggcgggcgctcctgtctttgtgctctttctaccgcccccgcgtcctgtcccgggggctctcctaggatcccctttccgtaaaagcgtgtaacaagggtgtaaatatttataattttttatacctgttgtgagacccgaggggcggcggcgcggttttttatggtgacacaaatgtatattttgctaacagcaattccaggctcagtattgtgaccgcggagccacaggggaccccacgcacattccgttgccttacccgatggcttgtgacgcggagagaaccgattaaaaccgtttgagaaactcctcccttgtctagccctgtgttcgctgtggacgctgtagaggcaggttgg

SEQ ID NO: 1252 - DNA, 324 bp, Homo sapiens
ccaggctggtctcaaactcctgacctcaagtgatccacccacctcggcctcccaaagtgctgggattacaggcgtgagccactgcgcctggctgagtacaatattaatgtagacaaaccatgaagtttattatttcatataagaacattacaggtttgttttttcttgcatgtctgtccacctaatgtttaagtagttctggtagctcttcctattctttattctatttgattccatttctgtgattcttttattaccactgatgttttgtgatagttaactatgataaatttaactgatcatgatttatcttctagagtattt

SEQ ID NO: 1253 - DNA, 400 bp, Homo sapiens
  misc_feature 57, 64, 115, 163, 170, 221, 241, 255, 294, 317, 319, 327,333, 335, 353: n = A,T,C or G
caagctttttttttttttttttttttttttttttttacaaataaatggggttattanacccaanagcagggtcagaaggagaaacagcaaaaacggggagtaagtgcccaggctnctgccccaaaccccttgaggaaaagagaaacaggtgttgggcaggaanaacagcnccaacagggaggagagggaggggattgggtcccggctctaccacggaccantcactttccccaggactcanttttgtcacctgtntaatgggggaagcacaatccttgcctgactccttccaanagcctcaattaggcttcggtgananagtgggtntggaananctttgcaaactgtaaagngcagtacacacatgcaggctagctgtggccctggggcccaggcccaa

SEQ ID NO: 1254 - DNA, 530 bp, Homo sapiens
ctgtaatcctcaggatcactttgcagtcttcaagattcagatacagaggaagcttcaattcaacctttcagagaagacattccagctcgcatgatctcatcaaccaagagaatgttggtggcaatcacagtgcaggagtgaagaagctgtttctttacacaatagttatcccatacgcctacttctgctgccaccattggctcacctgtgttcaggtccacacccacaagctgacctgattctgaatgttctgcttgaattttaactaatgtttcctgaaggtcaaaaccagagttctgagcaagaaccttgggaataatgagcaatgcatcagcaaatgcttggactccaagctgtgccctgccctttacactgggcttatgtttaatcagggcttctgccattgccacttccacggcaccagcacctggaaccacacagccatcatcaatagcatttttgacagccctcaagccgtccctcactgcatctttgatctgagtgagtgtgtgcttatttggtcctttgat

SEQ ID NO: 1255 - DNA, 314 bp, Homo sapiens
aaaaagttaactgtggcaccaattctaatgtaatccaacttgtgactgtttttttttgttttgttttgtttttgtgtgtgtgtgtgtgtggcactgggaaaagtggaaacaaacatgtattgaaatacatattggaaataaaaatggtttgagcgtcagtgatattctcccagaatgtacttatcttacctcggcatgtactgtagtcactcagtatttgtatatgttgctagaatttagattgcaaaatagtgaaattttaatgtgttcatttgtttttaatgtatatatgtcttgctcagattatttggttt

SEQ ID NO: 1256 - DNA, 512 bp, Homo sapiens
ctgagcggggacaacaaagagttcttctctgggaaaagttttgtctcagagcaaggatggaaaatggggacaacaaaggaaaagcaaagtgtgacccttgggtttggacagcccagaggcccagctccccagtataagccatacaggccagggacccacaggagagtggattagagcacaagtctggcctcactgagtggacaagagctgatgggcctcatcagggtgacattcaccccagggcagcctgaccactcttggcccctcaggcattatcccatttggaatgtgaatgtggtggcaaagtgggcagaggaccccacctgggaacctttttccctcagttagtggggagactagcacctaggtacccacatgggtatttatatctgaaccagacagacgcttgaatcaggcactatgttaagaaatatatttatttgctaatatatttatccacaaaaaaaaaaaaaaaccatggctaggtttatagatagttgggtggttggtgt

SEQ ID NO: 1257 - DNA, 50 bp, Homo sapiens
ctggccctccaggcccccgcccccatcccgtccacgttgctgtgtcgtga

SEQ ID NO: 1258 - DNA, 149 bp, Homo sapiens
  misc_feature 121: n = A,T,C or G
attgtagggctcgaccacggtgtcagacactttgggtgaaggcaccacactgaaggtattcatgatgcgatcagggtattcttctcggatcctgctgataaggagagtgcccattccagancctgtgccccgcccagtgagtgggtcag

SEQ ID NO: 1259 - DNA, 556 bp, Homo sapiens
cctaggggccgcaagacggctaatttattataatttctccttttttagtacatgcacagaaagcctgacagccaagtgtacatgaacatacacacacacacacacacacacacacacagaggccaatttccagtgaggaacaggctccacagaagaagctgataggcaggggggatcaaacgctgctcccctgctcaccgatctacttctccaaatacaatatcttgggtacctatgatggcaacgacatctgccaacatgtgtcccttagacatcttgtccaaaccagccagatgggcaaaaccaggagccttgatcttgcatcgataagggcggctgctgccatcagacaccaggtacaccccaaactctcccttgggagcctcaatggcagtatatgtggctcctggaggaacttggtagccctcagtatacaacttaaagtgatgaatcagtgactccatggaagtcttcatctctgctcgcttaggtggagacactttggcatcatcaaccttgatctccccaggaggcatcttgtttagacactgtgcga

SEQ ID NO: 1260 - DNA, 360 bp, Homo sapiens
  misc_feature 318: n = A,T,C or G
aaagctttgaaaagctactacttttacttctaatacatccagatgaacacgatgtagcaatatcagcttgtattccagagaaatctcattagtttttctggtgatggaaccacttatccacgtctgttggtactgtgcaggcagattcacagggtggtggtaaagcatccacaatggctctggcagcatcaggatcacacttgaaggggctctcagacaaagttgtattcatgcaactgattccttttccattcgttttcttagtcactaatgctttccaatggtcatgagtgcttttaataatatcaatggcaaagnccttatctttaaattctgcattaaacgcaaactcattttctg

SEQ ID NO: 1261 - DNA, 451 bp, Homo sapiens
ctgcagtgggcttggctttctgaggaaccaagtgtgtccacattgggggaacgtcatacttgatacacacttttttatctgcacaaagccagaattttcatgtctgatatatggtgattttcgtaagaaccagaactgctggcagaaagggggcacccacacgcttagatagccgatgtcttattagagggcagtttgtggtttctgatttggaatttaacattctccaaacattccagtacaatgaaagttttatccgctttcccatataaaaattcttcccatgagattgacttgattctcacaatcccgttggagtcgtgtgtgagtcctacagtgtgaggttcagcattgtcatctccaagtgctctccatagggaaacagtttctggtcatgatgagcttccgcttcccatatgatcccagcccggcctagctcggtggtgaacag

SEQ ID NO: 1262 - DNA, 332 bp, Homo sapiens
ctgctcagggggctgaggcaggagaatcgcttgaacccgggaggtggagattgcagtgagcccagatcgcaccactgcactccagtctggcaacagagcaagactccatctcaaaaagaaaagaaaagaagactctgacctgtactcttgaatacaagtttctgataccactgcactgtctgagaatttccaaaactttaatgaactaactgacagcttcatgaaactgtccaccaagatcaagcagagaaaataattaatttcatgggactaaatgaactaatgaggataatattttcataattttttatttgaaattttgctgattcttt

SEQ ID NO: 1263 - DNA, 198 bp, Homo sapiens; identical to SEQ ID NO: 578

SEQ ID NO: 1264 - DNA, 531 bp, Homo sapiens
ctgtagcaccaccatcctactcatcttccacatccccaatcatgcctcatcattgttaaaaggactcagaaatcacaagtgagaaaaatgaaacaaaagcagccatcccatagcttcagggtgagccttcacaggaccagatggataaagcagcagcactagtggaggtctgcaccttcctgcttttttacctatttagcttctaaaatttttcaacactgattttaagcaaggtctcgctctgttgcccaggctggagtacagttgctcactgcaacctccgcctcccaggctcaagccatcctcccatctcagcctcccaagtagctggcactacaggtgcgccaccacacccagctaatttttgtattttttgtagagacggggtttcgccatgttgcccaggctgatggtctcaaaactcctgagctcaagcgattctcccgcctcggcctcccaaagtgctgggattacaggcgtgagccaccgcgcccggcctgtacctttcttctgaatcttcttcttcttttt

SEQ ID NO: 1265 - DNA, 560 bp, Homo sapiens
aaaagactggatggatataaaatagaatcaactgtagtgttaggctgatcatgggaaatcaaagtaagtttgttttctcttgctgttccaacaattataggaaactatggtccaggaggcagtggaggaagtgggggttatggtgggaggagccgatactgagcttcttcctatttgccatgggtaagtagcttttgagttttacaattattattatcttgggagacatagctgcaggagtaaaagctttttaggatcatgttatctttccttaaaatctggttagatggataatttcataacctattttttttttactctttacttctgttgaaacaggcttcactgtataaataggagaggatgagagcccagaggtaacagaacagcttcaggttatcgaaataacaatgttaaggaaactcttatctcagtcatgcataaatatgcagtgatatggcagaagacaccagagcagatgcagagagccattttgtgaatggattggattatttaataacattaccttactgtggaggaaggattgtaaaaaaaaatgc

SEQ ID NO: 1266 - DNA, 616 bp, Homo sapiens
ctgctggctggctgggcccccgtagctggactggtttgacaagcccatgcctcccatcatttggctaccataagcaccaccgcttgctcctgctgtagaattcaagaagagttctacatatctgtgttctgaaatgagagaaaaggcatacaaaaggttagcttaaaaaaaagacactaaagtgatatttacacaaacccatgcctcccagcatttggctaccgtaagcaccaccgcttgctcctgctgtagaattcaagaagagttctacatatctgtgttgcatatttgctttgtcttttgacatagctgccacagcatcttcatgagttgcgaactcgacatctgcttcaccagttactctgccatcaggaccaatttcaatgtgtactctcacagggttgagcggtgaaaaaaaattataaatgtcattctcagtagctctgtaaggtaatccccgcatgtgtacacagtgtcctgttgtgctctggaaagtagagccaccatccccgtatctgtgatcagacattcctgaaaaacagtaattgaggtctcttccaaatctatctgacccaaatccatagccatcattatagccattgtaatcatcatagcc

SEQ ID NO: 1267 - DNA, 352 bp, Homo sapiens
ccaaggccagtgcctatctctcaaaacaactagacggggtttccaaaggctggcccccatggctaagggccctggcagcaactgccctgttagcacaagaagcagatgagctaactcttaggcaaaacctaaacagaaagtctccccatgctgtggtgactttagtaaataccaaaggacatcattagctaataaatgctagactaactagataccaaacctcgctctgtgaaaatccccgcataaccattgaagtttccaacaccctaacccagccaccttactcctggtaacagagagcccagttaaacataactgtttagaggtgctggactcagtttattctagtagg

SEQ ID NO: 1268 - DNA, 73 bp, Homo sapiens
  misc_feature 53: n = A,T,C or G
gtgtgtgtgtgtgtgtctgtgtgtgtgtgtgtgtgtgtgtgtgtgtgtgcgtntgtgtgctgtgtgctcgtgt

SEQ ID NO: 1269 - DNA, 517 bp, Homo sapiens
  misc_feature 500: n = A,T,C or G
aaattttagaaaacctgtataaattactggtgcataacttaaagattattctgcctttggctaattgagtaattcccctccagcactagagaccgctcagtgctcttactagatgaactcagtaacgccttgagctgggttgattgaggatgtgtgaaaagctcacagagcccgatgcctgctgctatttcacggcaatgagcctttttctttctacactgaagattttcttcttatttaatgtggtttattttgggctcagaaataattgctctgttgaaaataatcctttgtcagaaaagaaggtagctaccacatcattttgaaaggaccatgagcaactataagcaaagccataagaagtggtttgatcgatatattaggggtagctcttgattttgttaacattaagataaggtgactttttccccctgcttttaggattaaaatcaaagatacttctatatttttatcactatagatcatagttattatacaantgtagtgagtcctgcat

SEQ ID NO: 1270 - DNA, 144 bp, Homo sapiens
ctgggccgcacccttgggctctatgggaaggaccagcaggaggcagccctggtggacatggtgaatgacggcgtggaggacctccgctgcaaatacatctccctcatctacaccaactatgaggcgggcaaggatgactatgtg

SEQ ID NO: 1271 - DNA, 226 bp, Homo sapiens
ccattggcatcacagccaactttgtgaatggacgcaccgtggaggagacgcaggtgccggagatcagtggtgtagccaggatctacaaccagagcttcttccagagccttctcaaagccacagcagcaaaggagaaggaacctgtcccctcagggattaagcaagcacagccctagttgatcacccagcatgaaaagtcctggaatctctcagagatgaacctgtg

SEQ ID NO: 1272 - DNA, 602 bp, Homo sapiens
  misc_feature 567, 570: n = A,T,C or G
ctgggcatcgttgttggaattctggtggcccagatctttggtctggaattcatccttgggtctgaagagctatggccgctgctactgggttttaccatccttcctgctatcctacaaagtgcagcccttccattttgccctgaaagtcccagatttttgctcattaacagaaaagaagaggagaatgctaagcagatcctccagcggttgtggggcacccaggatgtatcccaagacatccaggagatgaaagatgagagtgcaaggatgtcacaagaaaagcaagtcaccgtgctggagctctttagagtgtccagctaccgacagcccatcatcatttccattgtgctccagctctctcagcagctctctgggatcaatgctgtgttctattactcaacaggaatcttcaaggatgcaggtgttcaagagcccatctatgccaccatcggcgcgggtgtggttaatactatcttcactgtagtttctctatttctggtggaaagggcaggaagaaggactctgcatatgataggccagaatgtgcttgccataggtgtacttacnaanagttgcgatgtggggccggatcttatgcatga

SEQ ID NO: 1273 - DNA, 539 bp, Homo sapiens
ccatcaagctgctggagtatgagccacgctcaggggagcaggtaccccttctcctaaagatgaagaggagcaaactggcactaagcaaggccatcgagagcggggacactgacctggtgttcacggtgttgctgcacctgaagaacgagctgaaccgaggagattttttcatgacccttcggaatcagcccatggccctcagcttgtaccgacagttctgtaagcatcaggagctagagacgctgaaggacctttacaatcaggatgacaatcaccaggaattgggcagcttccacatccgagccagctatgctgcagaagagcgtattgaggggcgagtagcagctctgcagacagccgccgatgccttctacaaggccaagaatgagtttgcagccaaggctacagaggatcaaatgcggctcctacggctgcagcggcgcctagaagacgagctggggggccagttcctagacctgtctctacatgacacagttaccaccctcattcttggcggtcacaacaagcgtgcagagcag

SEQ ID NO: 1274 - DNA, 451 bp, Homo sapiens
cctatctggttggcctttttgaagacaccaacctgtgtgctatccatgccaaacgtgtaacaattatgccaaaagacatccagctagcacgccgcatacgtggagaacgtgcttaagaatccactatgatgggaaacatttcattctcaaaaaaaaaaaaaatttctcttcttcctgttattggtagttctgaacgttagatattttttttccatggggtcaaaaggtacctaagtatatgattgcgagtggaaaaataggggacagaaatcaggtattggcagtttttccattttcatttgtgtgtgaatttttaatataaatgcggagacgtaaagcattaatgcaagttaaaatgtttcagtgaacaagtttcagcggttcaactttataataattataaataaacctgttaaatttttctggacaatgccagcatttggattttttt

SEQ ID NO: 1275 - DNA, 240 bp, Homo sapiens
aaaaaactggtttgtcaaatcacatacatgagcagatacacaactaccaaagtggcctgtaatagacaccagtggggcggtcaccacacagtacctgaaaaatacagctaaaaaaggaggagtctgttgagtatttaatttcagatctacttgactccttgttgaatggctttaagttagcatatagtgagtgagaggtagagtcccaagtataatagctgatgcctcagggctccattt

SEQ ID NO: 1276 - DNA, 397 bp, Homo sapiens
cctgatgcctcgatacagctagatgtacaaaaatatatcattcaaagtcatgaaaaccatcatcatattggtgtgacctccttcctccccttgggcacagcttttgcaactacctcctttgaaatctgggagttggtggggcaagggtcacttcttggcagcttcttcttgggcagccaaatctgcctccttctgagcagccaggaagatggctcgttccttctggaaagctgcaagctcttctgaactgaggtccttcaccacgcgaatgcccagagaacgggcagacccgatgatggagcggacaacagacgacaggggtacatcctgcagggcaaatgcctcatcctgagctttgatgcgggcaatctcatacacatgcttcaaggtcaccagg

SEQ ID NO: 1277 - DNA, 371 bp, Homo sapiens
cctgaatattttgcttaacagactgttggggatttcattatatgcagagcagcctgcaaaaggagaggtgtgaagcgaagatgtccgaaaactggctgttgttcatgaatctgaaggattgttggggtacatttactgtgatttttttcagcgagcagacaaaccacatcaggattgccatttcactatccgtggaggcagactaaaggaagatggagactatcaactcccagttgtagttcttatgctgaatcttccccgttcctcaaggagttctccaactttgctaactcctggcatgatggaaaatcttttccatgaaatgggacatgccatgcattcaatgctaggacgtactcgttaccaacacg

SEQ ID NO: 1278 - DNA, 84 bp, Homo sapiens
ccagaatggtctggatctcctgacctcgtgatctgcccgcctcggcctcccaaagtgctgggattaccggtgtgagccaccgca

SEQ ID NO: 1279 - DNA, 379 bp, Homo sapiens
ctgaaggagccggggagcagaaagtatatgtgtcaggtatgaggaagaaaatagattttggaagttatgagaaatgtagagagtgagttgagcatagtttgtgatttttagggcctctaacagtaccaaagcagcggcagccgctgcacgcagacatgagggctaggctaaaacagtaaggtcaagttgtttggacagaaaggctacagggtgcggtcctggctcttgtgtaagaattttgaccgcactaaccatgcctaggaaggaaaggagttgttgttttgtagaaggtgctggggtttgagagatcagttggccacgattggcagggagagcacgtgtgtttttatgagaattatgccaagataggtaacagatg

SEQ ID NO: 1280 - DNA, 423 bp, Homo sapiens
  misc_feature 28, 52, 197, 239, 328, 416: n = A,T,C or G
tttttttttttttttttttttttgaaanacaggctattttatttcaaaaaanaaaaaaaagtgggctctgggaacagggttagtccattcgggccttcagtgtcctggtggtgattttgtccttctcgatgatgtggacaatgactcccatgcctgacactgcatcccggtccacagcattcagcatggcttggganatggtttcaaacaggtgatccggatccatgttgggctcccanagggactcacacattccgtacatttgttcggcgcaggtgccactgaccacaaagtcatcagtcaccatggggcagccgatgaggtctanagagcaaatgaagggcttaaaggtcttcgggtccaacccggcaatgactggctcagtgtagtaagggccaaaccgtttctcatacaanaggttgg

SEQ ID NO: 1281 - DNA, 162 bp, Homo sapiens
ctgaaatttgtccttacagtcgagtccactgtagccaaatgcacacttttggcagttcccattagcatcttcctggtagccgggcacgcacgcacactcaggggccccaccactcttctttattaagcattgcttgtgctgtgcgttgcaggcatcaggaca

SEQ ID NO: 1282 - DNA, 206 bp, Homo sapiens
aaaacagaagcttatatacaacttagaatctaaaaccaatagatttatggtaaaccttaagactgaaccaaaacaaacaaaaaccaaagttttaatcatttaaaaatcatgtttattgaggtacaacttatagtaaaacctgcccttttcagcgtatagcactgagtcttgacaaatgcacagttatgtaccaccaccgaccaagg

SEQ ID NO: 1283 - DNA, 135 bp, Homo sapiens
ctgcggttaatccagcttgggcctgtctgcactgcgatcctcttgggctctcctaggatccccccatgccccgtaagaggtggaagacgcttccttccaggacagcaggctttgagtccagcaccccagcctgcc

SEQ ID NO: 1284 - DNA, 432 bp, Homo sapiens
aaaggatcacatgcgtgaagcaggtgatgtatgttatgctgatgtttaccgagatggcactggtgtcgtggagtttgtacggaaagaagatatgacctatgcagttcgaaaactggataacactaagtttagatctaatgagggagaaactgcctacatccgggttaaagttgatgggcccagaagtccaagttatggaagatctcgatctcgaagccgtagtcgtagcagaagccgtagcagaagcaacagcaggagtcgcagttactccccaaggagaagcagaggatcaccacgctattctccccgtcatagcagatctcgctctcgtacataagatgattggtgacactttttgtagaacccatgttgtatacagttttcctttattcagtacaatcttttcattttttaattcaaactgttttgttc

SEQ ID NO: 1285 - DNA, 153 bp, Homo sapiens
ctggtccttgcctgggagaactttgtggaaggaaaaggtaagattccttaagtccaaggagagaaccaatccagggtcaaatttcttttcattccctggatcacaacacaccagggaagagaggagtcaagaatgtctctccctgccagtgct

SEQ ID NO: 1286 - DNA, 188 bp, Homo sapiens
cctgggccccggtcacgtcgccaaccatcttcctgtccctagacttcacggagtaggcgaatgctatgaagcccagacagcaccagttcaagaagagggtgttgaacagggaccagacgacatggtcgggcacggaggtctcgctgtggatgttgatcacggtggaccttggaaggatggtgctgggg

SEQ ID NO: 1287 - DNA, 438 bp, Homo sapiens
aaaacaagcaaattttattaaaggaaaattttgcaggtttaaggtttgcaggtgaaattttgtaggtgaaaaggtttacttttcaccagtctgttctggcatgcttctaatgatgtcagagtcacctggatcaatgatagccagtgtgcacactctgtagtattttccgcatgctgtgcccagttcaatattattgccactgtagtgatggacaccagttttagccaacatagcatagtactctatttcagatttcctcaaagctgggcagttgttagcgagaatgaccaatttcgctttgccttgtctgatcatcttcagagtctgcttgtaccccaggacgtacttcccacttttcataacgagttggagcctagagttgatcgactccagcgactttttcgtcttctttgcggccaccatcttcctgccttagga

SEQ ID NO: 1288 - DNA, 312 bp, Homo sapiens
ccagtattcctggaggatataacactgacatcagcagggttttcaatggcaacaattgcacgagctgccagcagaagcttctcccaggtcctcttgagatttatgatatagatgccatcacttttccttttatagatgtactgttccatctggaagtcaagattggtgccacctaagtgggttcctgctgcaaggaacttaaggacatcctcctccttcatttgcaggacatcaagggctccggacattgtgaaaatttccctttaagttacgacgggaatccagaacaacgccgtatggacccctctgcag

SEQ ID NO: 1289 - DNA, 232 bp, Homo sapiens
ccacaaaacaccaaagaattgtaggcagtggcccctattgagaagttttccggtagagttggaaatcagttgtgaatacattctttgctagttggagtgcttgtttactaagcatgtgccgtcgtaggtattagtgctagtctcaaataggtgcttcccctgaggtgcaggggaagaccaaagtttgcaactcgaactgctttcgtccatgtttctcacattgctgtatttt

SEQ ID NO: 1290 - DNA, 93 bp, Homo sapiens
ctggcagggcatcatgtcaggccaccaaatccatccagaactaacatgcagtctctaatttggagactctttattgtgaccaaaagatttgga

SEQ ID NO: 1291 - DNA, 472 bp, Homo sapiens
  misc_feature 472: n = A,T,C or G
cctgacattcctgccttcttatattaataagacaaataaaacaaaatagtgttgaagtgttggggcagcgaaaatttttggggggtggtatggagagataatgggcgatgtttctcagggctgcttcaagcgggattaggggcggcgtgggagcctagagtgggagagattaagctgaagggaggtcttgtggtaaggggtgatatcatggggatgttagaagaaacatttgtcgtatagaatgattggtgatggcctggatacggttttggatgatttgagaagctaaatggaagatacaaggtccgaataaaaggaggagaaaaatgggtattaaatgtctaagaattgggaggacctaggacatctgattagagagtgcctaaggagattcagcatagtcctgccagcaaagattatttacttcaagagttaagagtggcagtttggggatagcaccaggagatatcan

SEQ ID NO: 1292 - DNA, 69 bp, Homo sapiens
ccagacctgaggcccacagacctggtccccacaaccaggattcctacaatgtacacattcctaattcag

SEQ ID NO: 1293 - DNA, 332 bp, Homo sapiens
gggaaactccgaggacagagggctaaatccatgaagtttgtggatggcctgatgatccacagcggagaccctgttaactactacgttgacactgctgtgcgccacgtgttgctcagacagggtgtgctgggcatcaaggtgaagatcatgctgccctgggacccaactggtaagattggccctaagaagcccctgcctgaccacgtgagcattgtggaacccaaagatgagatactgcccaccacccccatctcagaacagaagggtgggaagccagagccgcctgccatgccccagccagtccccacagcataacagggtctccttggcag

SEQ ID NO: 1294 - DNA, 207 bp, Homo sapiens
cagattgtgtacatagagcaatgttggttttttataaagtctaagcaagatgttttgtataaaatctgaattttgcaatgtatttagctacagcttgtttaacggcagtgtcattcccctttgcactgtaatgaggaaaaaatggtataaaaggttgccaaattgctgcatatttgtgccgtaattatgtaccatgaatatttattt

SEQ ID NO: 1295 - DNA, 342 bp, Homo sapiens
ccaccacttgtacccgatatggacttccggcttctctgtccaatggagccacactaaagatctcaccagtcacgtggtcaattttaagccaacctcttgtgtctcccctcagtgaatagcttatgtccagaccttctggatccttggcagtcacattgcccactttagtgcctatagctacatcctcactgactttcgcttggaatacgtgttgggaaaattgaggtgcttcattcacatctgtcacaataagcgtgaacttggcaaaagaacttgcattgtacttcacaccaaacactagaggctcaggattttctgctttgaacacaatgttggaaacag

SEQ ID NO: 1296 - DNA, 83 bp, Homo sapiens
ccaatgtggttggtcttcagcttgcagttagccaggttccataccttgaccagcttgtcccagccacaggagacgatgatagg

SEQ ID NO: 1297 - DNA, 147 bp, Homo sapiens
gacaagcacaccctgagcaagaaggagctgaaggagctgatccagaaggagctcaccattggctcgaagctgcaggatgctgaaattgcaaggctgatggaagacttggaccggaacaaggaccaggaggtgaacttccaggagtat

SEQ ID NO: 1298 - DNA, 381 bp, Homo sapiens
ctggtctaaaagagtatctgtgcattcctcacagagtgggtgatccacatctgtctggcccgacatgatgtcaaaaaggtccccagtgacctggaagtgtgggagagtcagggtagggcctcccccatgcttcctgctcaattacccactctcccagccaggcctactgcttgccaccggaatggggccggcttgccttcagtcttcggctgaggttctccatggtgccgccatcagatgcctccccaatcagagtgaagctgttggcactttctgtggacatcatcctgcagacagccccccgcccacgggccacatgagggaacagagaggcttcctccacctactacaatgccagtggcagagactctcaagcaccag

SEQ ID NO: 1299 - DNA, 396 bp, Homo sapiens
ctgctgcctgtggcgtgtgtgggctggatcccttgaaggctgagtttttgagggcagaaagctagctatgggtagccaggtgttacaaaggtgctgctccttctccaacccctacttggtttccctcaccccaagcctcatgttcataccagccagtgggttcagcagaacgcatgacaccttatcacctccctccttgggtgagctctgaacaccagctttggcccctccacagtaaggctgctacatcaggggcaaccctggctctatcattttccttttttgccaaaaggaccagtagcataggtgagccctgagcactaaaaggaggggtccctgaagctttcccactatagtgtggagttctgtccctggggtgggtacagcagccttggt

SEQ ID NO: 1300 - DNA, 577 bp, Homo sapiens
  misc_feature 469, 474, 475, 524: n = A,T,C or G
cctgtaattagattgttagctcttcgtggctcttcaatgtcttttgaacatgtgggagatacttaataaaaagcatagctctaggacactataaaaattgctaattactccccttggaataaagacataagaacatttgcttaagatttaatatgttatatataggcttgggcatacagcagtgaggggtggggagattttgaaaagttctggtttgtcatttatgtagctggtagttttgttttgaacctgttatgagcaaccaccggaataatctgttccccatagaaactgaacctaaacttcaaatttttattatctaagctataataataggcggagtcgatctggaacatacagctcgagatcaagaagcaggtcccgcagtcacagtgaaagccctcgaagacatcataatcatggttctcctcaccttaaggccaagcataccagagatgatttaaaaagntcaannagacatggtcataaaaggaaaaaatctcgttctcgatctcagagcaagnctcgggatcactcagatgcagccaagaaacacaggcatgaaaggggacatcat

SEQ ID NO: 1301 - DNA, 533 bp, Homo sapiens
cctcatagatgccatcaagcctttcctcgactattatgacctggtggatggggtctcctaccagaaagccatgttcatatttctcagcaatgctggagcagaaaggatcacagatgtggctttggatttctggaggagtggaaagcagagggaagacatcaagctcaaagacattgaacacgcgttgtctgtgtcggttttcaataacaagaacagtggcttctggcacagcagcttaattgaccggaacctcattgattattttgttcccttcctccccttggaatacaaacacctaaaaatgtgtatccgagtggaaatgcagtcccgaggctatgaaattgatgaagacattgtaagcagagtggctgaggagatgacatttttccccaaagaggagagagttttctcagataaaggctgcaaaacggtgttcaccaagttagattattactacgatgattgacagtcatgattggcagccggagtcactgcctggagttggaaaagaaacaacactcagtccttccaca

SEQ ID NO: 1302 - DNA, 232 bp, Homo sapiens
aaatattaacgcacactttttttttattatattaaaatcaggcaatggtctgacaataaaaaggctgcttatggaatactgttatgttaaacttcacttacaggatgttaaatccttagaactaaggttttccccccagaaaaagattaatggaaacatcaattgcttttcagacttgatagttgctgcttcaaaaggtggttttacacaaatactaaattaaaaaaaaaaa

SEQ ID NO: 1303 - DNA, 422 bp, Homo sapiens
gttatttaaggaggaaaaaatattaaattttgaattgagtgtgtaggctccctatcattatatatagagtttctttttccacggtagtcagtgacttaacctgaattgtaaatgtttgtaaagggttaattgtcctacatcaaacttagttaaataattccatccacttatggaggaggaggagaatgtggaagaggtaaaaagctgggcacaagttcatatgcctatgagtcagtaaagactgaagtaatgtcctatgttgagctggttattttgatatatgataataattatctttgaagtagaacaattctgttaactggaaaatcacaggatatatccatcatatttttcaggacagatagtttttactgtggggcaaataggttaaaattacactatgttagttgcatttaggtttt

SEQ ID NO: 1304 - DNA, 495 bp, Homo sapiens
  misc_feature 454: n = A,T,C or G
ccactggagtttatttggttgctgacggcttgactgaactggacaaggttcccattaggcaactgcactgcaccattcacggtgctatctatgctggtttcctctttcaagtccacgctgggaagcctctctctctggagcttcctccaaatctccaagtttgaatgagactgttctctcctccaccacagcctggaggggcacagtggcaggccctacctcagaaacaggatgcttgttttcaatatcaccaacagacaactttgtttcttcatggtcttctttcaagctattctttttttccattaaggggctttcagaaggactacactttatttctcgttcaatttttctcttcatcctgggacatacaaagaaccagacgataagggcacagaaaactgcacatcccaccgagatgaggatggtaccccacagaggaagtttgtcaaancccagcactaggagataaaatggtgcatcttgaaaacccca

SEQ ID NO: 1305 - DNA, 336 bp, Homo sapiens
tggggctgctcttgatatcagtgtgaaggggcctgcctttaatatggcatctcctgagtcagattttggcatcaacttgaagggcccaaaaatcaaaggaggtgcggatgtttcagggggtgtcagtgccccagacatcagccttggtgaagggcatttgagtgttaaaggttccgggggtgagtggaagggaccccaagtctcctctgctctcaacttggacacatctaagtttgctgggggccttcatttctcaggaccaaaggtggaaggaggtgtgaaaggaggtcagattggactccaggctcctgggctgagtgtgtctgggcctcaagg

SEQ ID NO: 1306 - DNA, 101 bp, Homo sapiens
ctggtgcggcccggtgtggcccagcccgaggacaccgtgcagttccggatccccatggaaatgacaagggtggacctcaggaattacctcgagggcatcta

SEQ ID NO: 1307 - DNA, 369 bp, Homo sapiens
ctggagaccgacaggatttgccatgcatttgcatcttgctagagtttggtttttatgaaagggcctattttttttaagttggcatattttgagtggaaacactcaccctaccaaatatacttaagttgcaactctaaaagcataaggacattttcaaattttctcttcttcaactgagaaaatgaatgtgccaggtgacatattatatacttgtacttgcatacacatagaaatatatcactgtgcaaattcgtccttgactttataactgaatttcacctcaaattatacattaatttgcagaacaaaatattaggaatgggcacaaatctgtggttcctgattttggtcattttcaatttctgtagg

SEQ ID NO: 1308 - DNA, 145 bp, Homo sapiens
  misc_feature 120: n = A,T,C or G
cctttctccaccaaggaaaaaacgagaagaccccaaaaccaggagagactctgtggactccaagtcttctgcctcctcctctccaaaaagaccatcggtggaaagatcaaacagcagcanatcaaaagcggagagccccaaaaca

SEQ ID NO: 1309 - DNA, 514 bp, Homo sapiens
  misc_feature 492: n = A,T,C or G
ccacggggactgttattcgcaagctggttttctagacctgttagctggaagcatggtgagcaccatttctggacgctcaggccgtgtcgggcttcagtcatctccaccacacaggtacagcagcgctttctggtagtcgcccttagtgtcttgctggatataatagtacagggacttgccgtactttctcttgaattcagacctaattttcaacatgtccacttcactgcgggagaccatgattctgatcaggaccttatctcgcgcccccttgcccttcatggagtcatacagccgatcagcaaaatacaggggcttgttctgaatgcactgaaccaggttcaggaaagcattttccaggtctcctttaacctctttcctgatgctttccaacatgtcataagggctgtaactcttgtacctatcaaatactttctggaggtggggcacgctccgctcggtcatgatgctgatccacttgggaacatcagntcctttcctcttcactccagcg

SEQ ID NO: 1310 - DNA, 199 bp, Homo sapiens
aaaattacatttgtagaagtcacacaacagaaagataccatgcggttgaacagtgtgcctgtacttgaacaagtgagagaagatacatactccaaaaaggagattcagtctagtgttacttcagttattcacatagtgtctacagggcagaatctcttccaaagcaatttttctgttcactaatctacaggcactaatg

SEQ ID NO: 1311 - DNA, 307 bp, Homo sapiens
  misc_feature 95: n = A,T,C or G
ccaccttctcactgtgttctcacagggtctttcttctgtgcctgtccctcgcagcagtctctcccggctctcttttgaaggagattggagtgcanaattggctagtctgaggtttcagtgtgcaagacgtagtcagatggctcacatttggaaccctggtagtaatgttttattctttgtccgatggcattgggcgggttgacccagcctgcagtcaggatttccttgtaccgttcacccgggagttcagaatcgcactctggctgaaagttcagcaagagcaccattgtcagcctgactgccctgt

SEQ ID NO: 1312 - DNA, 483 bp, Homo sapiens
aaagacatgccaatttgaaaaggcatcaaagtaaaaaaataaaagcaaatgctaaaaactactttacaataaaaaaattaaataatcggcaggttaaatgaatgtaaaatgaggaatgtacagtgaaaaacaaactaatataaagcattccagttgataaaaacctcctcaggcttatggtctgttttccaaggaaattatgtttcaatgtaaagtttgaaatactccagacatacattccatgtaggttttgggtgccaatgttaaaatttcaaattttgcatgcaaggcttagcaaagaaacactggcagaattccagcatttgcaaaattctaagttttggtgaatattgtaaatattacaattggtattagaaagccatgatgaatccagaattaagagaaaacccatttcataaatattttgtttgattaaaaaataccaggcttaccatgttctaaataactcaagaaaatatcttt

SEQ ID NO: 1313 - DNA, 471 bp, Homo sapiens
aaaataggttgttggagctttcctcaaagggtatggtcatctgttgttaaattatgttcttaactgtaaccagtttttttttatttatctctttaatctttttttattattaaaagcaagtttctttgtattcctcaccctagatttgtataaatgcctttttgtccatcccttttttctttgttgtttttgttgaaaacaaactggaaacttgtttctttttttgtataaatgagagattgcaaatgtagtgtatcactgagtcatttgcagtgttttctgccacagacctttgggctgccttatattgtgtgtgtgtgggtgtgtgtgtgttttgacacaaaaacaatgcaagcatgtgtcatccatatttctctgcatcttctcttggagtgagggaggctacctggaggggatcagcccactgacagaccttaatcttaattactgctgtggctagagagtttgagg

SEQ ID NO: 1314 - DNA, 237 bp, Homo sapiens
  misc_feature 160: n = A,T,C or G
aaaaaaacttccatgcccttccattcccctccctccaaactaggtattgtccaagttgtatcaaatgccacaaagtctaccatgcacccagaagcagagaagacaggaggtccagaggacaaggtatgctggggtcactactcgcactgcagagtccacncgagttaactcatgctgggggcaaagaatggaaagagctaatacacagacaaagcaaaagaacgaaatgcgcagcct

SEQ ID NO: 1315 - DNA, 312 bp, Homo sapiens
aaaaaaaaaaaagtcaccagcaagtagtcccgggtgggaggtgggagcagaataaaaaaaaatctgcaatgattcctaattgtttttcaatacagaagcttgggaaggggtttctgccagtttcatgaggaaggcacaacttccaggtagtgttggggaagggtatgaggtcctatgcaggctggcctcttatcccacagatgccaagatgatgtctactggcagctcctccaaacttctggctgtcacctgcattgtcactgtgtccaaaagcagcagccgggagcgcaccaggatgtcatgaccaccccg

SEQ ID NO: 1316 - DNA, 425 bp, Homo sapiens
  misc_feature 26, 42, 73, 98, 110, 173, 186, 206, 214, 230, 243, 266, 276,287, 317, 335, 337, 360, 418: n = A,T,C or G
gcaacctccacctcccgggttcaagngattctcctgtctcancctcctgagtagctgggatcacaggcgtgcnccaccatacccggctaatttttgtnttttcagtaaanacggggtttcaccatgttggtcaggctggtctcacattcctgacctcatgatccacccacctnagcctcccaaagngctgggattacaggcatganccaccgcncctggcctgtttacanactttacaaacanattttgtttacaagctttacacncacggttcanttgcagttagngtatattatgctgggcccaaaacaaatgtnttttttttttttcccagngnggcccaaggaacccaaaatttanacaaccctgctctaaagggtttgattcatgtttccactgggttatgcttattgcctgnaattcca

SEQ ID NO: 1317 - DNA, 172 bp, Homo sapiens
aaaaagatctgcttttatacagaaattgaaggatgccatattatgagtgctttaagattttattctactgacttctaaaactgttaatatatctttttttaaataaaaaaaaaagtttgctgtcttttttaaaaagcaatcctcaaactctctagccacagcagtaattaag

SEQ ID NO: 1318 - DNA, 135 bp, Homo sapiens
cctagagagctagagaagcaagtaagggccagggccagagtcggcttcaatggaacaacagcccagtgccctaaggcccctaactcttgctggctgtttcttgaccccaagccagggttgggagtcctctgggca

SEQ ID NO: 1319 - DNA, 294 bp, Homo sapiens; identical to SEQ ID NO: 71

SEQ ID NO: 1320 - DNA, 125 bp, Homo sapiens
ctgcctaagtagaggacaaagactttctcctttcaaaggagaactgagtccaggattggtaagtttaaggcacttaaccttgaccagctctgtaggtctggagcattctggtccctggccgcttt

SEQ ID NO: 1321 - DNA, 186 bp, Homo sapiens
ccttcctaaaaaatagtggtgagctggaggctacttccgccttcttagcgtctggtcagagagctgatggatatcccatttggtcccgacaagatgacatagatttgcaaaaagatgatgaggataccagagaggcattggtcaaaaaatttggtgctcagaatgtagctcggaggattgaatttc

SEQ ID NO: 1322 - DNA, 84 bp, Homo sapiens
cttgacgttgacaatcgagtagtactcccgattgaagcccccattcgtataataattacatcacaagacgtcttgcactcatga

SEQ ID NO: 1323 - DNA, 97 bp, Homo sapiens
tgcagcagaccgtaaccattatagacgctatccacgtcgtaggggtcctccacgcaattaccagcaaaattaccagaatagtgagagtggggaaaag

SEQ ID NO: 1324 - DNA, 437 bp, Homo sapiens
aaaattacatcagctttgttatcctggtagtctcggagaccaaccaaaataatgtccgaggtatttatccaaaccttttttctcaattttcctctgatgtgacataacctctttacaccatcgaaacacattgcttctagccgtccatttcccaacattttgattacctgagcatactcctgaccatcttctttgaataccagttctcttttttcagattcattctcattcttacccctgcgtctgtttttacctcctttacctttattcttgggcatggcggtggcggcgacctcgcggcgtctctgacttctttccgggtagcggcgaccgcggcggctgctgctccgaggggcgacacgagggagcgcgcgggaccaagtaggtgctggaggccaggcaacgtgcgcgggagaggctggcgacccagctcttca

SEQ ID NO: 1325 - DNA, 527 bp, Homo sapiens
  misc_feature 498: n = A,T,C or G
ccacttctgtaaaatccaaaccactccgaatctacagggtccacaatggaatcattgaggaatttcaccatcacaaacttcttcagggccatcaggtttttcttgtaggactcattgataccccgctcctgatttatatctgccaagaagatgctgtggttgcgatacacatcctcctttatggggtcatgccagtattcggcttgcacgaggcgttcctgaacaactttggagtacgccccagcattcagtgtttttcggatgaagtcacagatgtgagagctctctcctgggcatcgagggagtccaaaaacaccttgatgttgtcccccaaccgagatcagattgatcatgggaggtgaagggcatctctgagccactgccctcagaaattggcctccctgggagaatcccatagcattgtagccttgctgcaatttaggatccttagcaagtgcctgacacactgttgttacttgggaattgacattcaagaanaagctgttctccacgtcctccatcagggt

SEQ ID NO: 1326 - DNA, 330 bp, Homo sapiens
ctgcagccgcagcctgtggctgtgcagggccccgagccggcccgggtcgagaaaatatttacaccagcagctccagttcataccaataaagaagatcctgctacccaaactaatttgggatttatccatgcatttgtcgctgccatatcagttattattgtatctgaattgggtgataagacattttttatagcagccatcatggcaatgcgctataaccgcctgaccgtgctggctggtgcaatgcttgccttgggactaatgacatgcttgtcagttttgtttggctatgccaccacagtcatccccagggtctatacatactatgtt

SEQ ID NO: 1327 - DNA, 512 bp, Homo sapiens
ccactaaaattcatattgagattatcttggtttcttggaagagataggaatgagttcttatctagtgttgcaggccagcaaatacagaggtggtttaatcaaacagctctagtatgaagcaagagtaaagactaaggtttcgagagcattcctactcacataagtgaagaaatctgtcagataggaatctaaatatttatagtgagattgtgaaagcaaccttaaagttttgaagaagactgatgagactaggtgctttgcttcctttcatcaggtatctttctgtggcatttgagaacagaaaccaagaaacatggtaattactaaattatgaggctttgctttttgtttgcttttaagtagaaaaacatgttggcaacattgagttttggagttgattgagataatatgacttaactagttttgtcattccatttgttaaagatacagtcaccaagaatgttttgagttttttgaaagaccccaatttaagccttgcttatttttacctg

SEQ ID NO: 1328 - DNA, 120 bp, Homo sapiens; identical to SEQ ID NO: 596

SEQ ID NO: 1329 - DNA, 309 bp, Homo sapiens
aaaaatctgaaatagtaaattaaatataaaaatgtaaactctgaaaggagagaaaataagaataaatatgtgtaaaggtaatgcattaagatacaaaggatctcacagaggttaatattttacaacactaaaaaaaaataaaatgctctatatattttcttagttgggacattttgtttcaatttaatttttggttatgttaacaaaaattacctctaaagaggatgttaaaaaaatagcaatgacgttaccatcttaactaatgaatatcctatcaccctaattttttctaaaagaaatggatttttt

SEQ ID NO: 1330 - DNA, 221 bp, Homo sapiens
ctgttgcaatcaaggccatggcaaaataactggctcccagggtggcggtggtggcagcagtgatcctctgaacctgcagaggccccctccccgagcctggcctggctctggcccggtcctaagctggactcctcctacacaatttatttgacgttttattttggttttccccaccccctcaatctgtcggggagcccctgcccttcacctagctcccttgg

SEQ ID NO: 1331 - DNA, 103 bp, Homo sapiens
cctgttagaaaagcacccacccaagcctcctggcatcagctaagccattggcattgtcgccattcccacagggacatccgcagaccatcgtgagataaggctg

SEQ ID NO: 1332 - DNA, 453 bp, Homo sapiens
agaatttcagagctgaagattttagaagcaaagcaaacacattctggatacacgtgagatccaagtggtgactgtgctactgagaagctgaacgaaatggaaagcaaagcctgttggagctgaggtcaaagaatgtgaagccagagtggatactgaatgggaaagttaataacaaggatgtggaagctattgaggagacggagtgcgcctaaagagctgctaagccacacatctcttgagacccagaagctcgatctgatgactgaagtgtctgagctgaagctcaagctggttggcatggagaaggagcagagagagcaggaggagaagcggagaaaagcagaggagttactgcaagagctcaggcacctcaaaatcaaagtggaagagttggaaaatgaaaggaatcagtatgaatggaagctaaaggccactaaggctgaagtcgcccag

SEQ ID NO: 1333 - DNA, 174 bp, Homo sapiens
cggccgaggtaaagtagtcttccgtggttgggaagcctcacctcccaagaccagagtcagttggagctggttgttgttggaagggagtgggttggggaactggggtgggggcagggagatccccccgctctgctggcggtcctaggtggagaagaactgcacttcacagagtct

SEQ ID NO: 1334 - DNA, 329 bp, Homo sapiens
cctgcaggggatgggaccttccagaagtgggcgtctgtggtggtgccttctggacaggagcagagatacacctgccatgtgcagcatgagggtctgcccaagcccctcaccctgagatgggagccgtcttcccagcccaccatccccatcgtgggcatcattgctggcctggttctctttggagctgtgatcgctggagctgtggtcgctgctgtgatgtggaggaggaagagctcagatagaaaaggagggagctactctcaggctgcaagcagtgacagtgcccagggctctgatatgtctctcacagcttgtaaagtgtgagacag

SEQ ID NO: 1335 - DNA, 484 bp, Homo sapiens
  misc_feature 458: n = A,T,C or G
ctgccactatgtggtcagtttctaccttcctgccgtctttcagcttgataagtaacttgccactgctgactccaacggattgcacaatagcattgggcatcaccttaaccccctctcgtctgactttttccatggtccagttgctgaggtattcggggaggatctttcccatatttcctttctcggggaagagttgaatcacttctgtgcccaaggctcgagcctttctgccaagagcacaggccagttcgctaccaaggaagcccccaccgataatcgtaattgatttgacttcccgtgaaatcttctccaagcttctaaagtctccaatctttctgaaaagcgttgttctactcttcacctctgctccagccctatcaatggcagacagacttcttggagtacctcctgttgcaatcaagcacttttcataggttatttgagagccatcattaagnttcaccatgttgtctctcacatccag

SEQ ID NO: 1336 - DNA, 590 bp, Homo sapiens
  misc_feature 542: n = A,T,C or G
tgctgggattggaggtgaaaaagctggcggttttgccccgtattatggagatgaaccaatggatttcaaaatcaacaccgatgagattatgacttcactcaagtctgttaatggacaaatagaaagcctcattagtcctgatggttctcgtaaaaaccccgctagaaactgcagagacctgaaattctgccatcctgaactcaagagtggagaatactgggttgaccctaaccaaggatgcaaattggatgctatcaaggtattctgtaatatggaaactggggaaacatgcataagtgccaatcctttgaatgttccacggaaacactggtggacagattctagtgctgagaagaaacacgtttggtttggagagtccatggatggtggttttcagtttagctacggcaatcctgaacttcctgaagatgtccttgatgtgcagacctgcccgggcggccgcccgggcaggtccacagtcctcccatggagggcctgccgtgacgctcagtggagagggcagggcctgtgtctccacttangccacacagtgatgaggaaaccacagatggagcttcttgccgataata

SEQ ID NO: 1337 - DNA, 419 bp, Homo sapiens
ctgacgcgtcatttcagcatttttccagccttttttgaagctctttaggaagccttcccgtggaggtaatttgtccaggtcatgtacaacacgctgggggattttaagtacagtgcgtactgctggaatccggagacaggatacttggaccagggaaaacaaattggaggagagccagtacataaacactgccgtggggaaatgcatggttatgggcaaggttatcaggggcatcattctgatgacatttctcatccactgaaggtcagaactttgcacacctgtctcagcacctagctcaagaacagcccacattgtagcagtgactgccagtggtaatatgtagatgggatcggataccgtgagatcctggaaccaccagaggccacctgtctgcaggctgggcacaggaaggttgg

SEQ ID NO: 1338 - DNA, 397 bp, Homo sapiens
ctgaggccgagcccaactaggtcctgggcacccctgcaggtgggagtggtccttgtcctcctggtatccagcagacacccccctctccccaccagccccattctcaggtcctttcctctttgtcaccaacaccaagaatctgtccagggttcttggcttatcttttatctcttttcactcctagagaggaattgcaattgactcagaatgacacattttggcaccacgtgtgtagaaagcccccactgttagatgatagcctcgtgaaattcatgtttctgtattctcctatttcttttcaaaaactaatttttttttttagtgtaataaatcctaagagggaactgatttaagaaacaaggccgccaaacaaaggcagcagttccgactccagcag

SEQ ID NO: 1339 - DNA, 527 bp, Homo sapiens
  misc_feature 435: n = A,T,C or G
ctggtcacccaactcttgtggaagaggggaattgagatcgagtactgaatatctggcagagaggctggaatccttcagccccagagcccagggaccactccagtagatgcagagaggggcctgcccaggggtcagggcagtgggtatcactggtgacatcaagaatatcagggctggggaggcatctttgtttcctggtgccctcctcaaagttgctgacactttggggacgggaaggggtagaagtagggctgctccttttggagctggagggaatagacctggagacagagttgaggcagtcgggctgtccaggttctaagcatcacagcttctgcactgggctctgaggagattctcagccagaggatcccagcctcctcctccctcaaatgtcagtccaagcaaataccaaagcaacgcatcgattttgtngaagtcaattagagatgtggggagctatcggagacaagcactattgtaccttttcacctccacacttgtcacaagcagggactgtctcctcc

SEQ ID NO: 1340 - DNA, 348 bp, Homo sapiens
ctgagctgcaggatgggcgctgggctgactggaggggtagacggggtggggtctgaccccattagcctttccccatccaacctgggcccccataagccattctctggccctctgcacaagacagactcagcaaatctgcgaggtatggggattctgccaactccccacctcgcctcaccttccctaggtctgccgggtgacccaatccactgggtgcagccccacccctgctcaaccccacatctggacagacacatggcaaatatggaactgaagcccggctgggctggagcacatctggttgttgttgggttggagtcgtcttgcaggtgtcccaaggtggtcagg

SEQ ID NO: 1341 - DNA, 124 bp, Homo sapiens
gaaataaaaaaataggctttgtgtatggttaaactgtaaatcttatgtttacaaaatactgtaattttcaggaaatcactgtattaggaatgtgcaatgacttatataaataaaagccattttt

SEQ ID NO: 1342 - DNA, 415 bp, Homo sapiens
aaatatcttcattttgatctatcattaatggagaaatattccgtctaccatgtatataaggactttcagcagatgaaatgcttaaatagtttaagggtggaaatgaatacagcaattagaaataaggggttgataaaatatgcatttagttttgctgttacagttaaagaagcattttttaagaaagactttctcatttatctactttgtgcaataaaacttaatttttgttgttgtgatttatcttacaaaggatactgtatactgttctctttcccaaactaaagtctaaatttgcactaaaaaaaaatcatgcatgatgaaaagaccagcctacttaaatgtgcttggagtcctttcatgttggcatggatcaaagcctgagtatcccttcaaacattttccagtttgccag

SEQ ID NO: 1343 - DNA, 555 bp, Homo sapiens
aaaagttattatttttttactctttcttttctttggagagggtaccaaaggatagctgttctgtttaagtagggacctctcatggcctacaggctttgacatctgagaatcaaactggagaacattccgaagccgttcttataagtgcctccatctctacctgggctgaaatggaatgtgcaaatgtagcccagcctggtccttgggtgttgccagttgattgatgactgggagccaaagtggcatctcctttgacctaaacgggcgatgatgaaataaaactcaacagcctttctctcatcttgcattgtgagatgcgaaatagagcgtgtctctctgcctctcattttaggctgaggccgtccaaagcggccatgccccatgtttccactagatggcgctgacacttcaggcatcaaccctcatggcctctcagccttgcaaaggcagccacttaaagtcggtgtcctgtgtggggcaccaagctgagctgcagacacccagtaggcgcgaggcaaatgcgtcccattttaagaggcttgtatttatgagctc

SEQ ID NO: 1344 - DNA, 551 bp, Homo sapiens
ctgaagcaacttgggattaattgcttgattagcttcacgaagcacagagataaggtcgctcacttgctttatgttattaggtgtaaagaaagtgtatgctgtgcctgttttggtactgcgagcagttcttccaattcgatgaatataatcctctgaggagttagggtagtcataattgatgacaaatttcacatcttccacatctagccctctggaggccacatctgtagcaatcagaataggagcttttccatgtttgaattcatttagaacccagtcacgctcttgttgactcttgtcaccatggatacccatggcaggccacccatctctcctcatttttctggtaagctcatcacatcttcttttggtttccacaaaaacaatggttttattctccttctcactcatgatctcttccattagacgaataagtttttcatccttttctacgtcatgacacacatccacaatctgaagaatgttgtggtttgcactcagttcaagtgcaccaatgtttatatgaatatagtctttcaggaaatcttcag

SEQ ID NO: 1345 - DNA, 213 bp, Homo sapiens
ccaggctggtctccaactcctgacctcgtgatccgcccacgtcggcctcccaaagtggtgggattacaggtgtgagccaccgcacccagcttaacatcttcttctttgactaggtaataactctacacagccaggaaagcattcctgatatcaaaacccctcctgaagcacttccagctcattttttctgttctgtcttcagagaaagaaatc

SEQ ID NO: 1346 - DNA, 500 bp, Homo sapiens
ccagagttgactctaggtagtgatgtgattttcttgggatgtttttctaaatattcttttatgctaaagcacatggcttgatacttctgttgattaagctcgtgtctacttacagtcatctagtgagaacctgtggtgtggtgagatgataacttggtctttggtcttcatcatttgaactagttttggttttgtcttgtcccttccttgagcattttgtgtgtgtttaatcctatttggtaaacgaaccactgtgaaagaccaagttggagaaaacagaacacccccaaaacatttattttttttttttagaaaatcatggctcactatggtagtatacaatattgttttcacacatgtacacttgaaaccaaatttctaaaacttgtttttcttaaaaaatagttgttgtaacattaaaccataacctaatcagtgtgttcactatgcttccacactagccagtcttctcacacttcttctggtttcaagtctcaagg

SEQ ID NO: 1347 - DNA, 231 bp, Homo sapiens
ccaccacaccgggcaaattattttgtatttcttttttcagagacggggtttcaccatgttgcccaggctggtctcaaactcttgggctcaagcgatccacccacctcggcctcccaaagtgctaggattacagatgtgagcattgtgcctggcctagatcgcccagactatgtgtggtgaaaaaccactttccttcttcaaaattacaatctttcatggaccaacactttt

SEQ ID NO: 1348 - DNA, 435 bp, Homo sapiens
aaaatcttgagggattgatctcgcctcatgacagcaagttcaatgtttttgccacctgactgaaccacttccaggagtgccttgatcaccagcttaatggtcagatcatctgtttcaatggcttcgtcagtatagttcttctccaggaactcgcgcactgacttggcaccccgacctatggcattggccttccaggcatggtatgtgcccgaggggtcagtctgatagagcctaggagtgccatcaaagtcgaaacccacgatgagggcagagatgccaaacggcctgcgcccattgctccgcgtataacgctgcttcagactggcgatgtagcgggtgatgtactccacagtgaccgggtcctccacagtcagccggtggctctggcactccacccgggccctgttgatgactatccttgcatcggcggtgagg

SEQ ID NO: 1349 - DNA, 463 bp, Homo sapiens
caggtaaatataacaaaatgtgtaatttgtgactctaatattaaataagatatttgaacaagctaggaaaattgaatttctgctgctgcttcaaagaaaaagctgccccagagcattaaacatggggtattgttaagaagcaaaatgttcttgtttgccatcatgtgtttcacaccacaattctgtgccacagttaagagggtctggtacccttgcaggacctttgtaggttgtgggaaaaagtcgcagaaagatactcaaagtggagcagggaatggagacagacatcagtgatgataaaaaaaaaaaaaaatggaccttaagaaactatttactctgtaatctctaataaaatatggaattccatattagggcaatgaggctgaaactactggtgtttttctgccttgagaaaacaaacagttaaaacaagcctcaaatgtattttagtgccacccactgg

SEQ ID NO: 1350 - DNA, 56 bp, Homo sapiens
ccatactgggggaacagttcatggttggggaggagatctgtggggctgtggtgtct

SEQ ID NO: 1351 - DNA, 513 bp, Homo sapiens
  misc_feature 509: n = A,T,C or G
ccagcctttcacatcccatgggaaaccgcccccccgggccttggagaatgggggtccaagtgcctatccccctttggatgtaaaattcatcgttagtaaacatcatccgcccagcaacaagcaaagcacatcgcaagattaaaacaaagaatccgccgtgaacagaaggcagcaaagaaaatgtggagctactgggatcccaggtgcaccaggactctgtgaggacagcacacctgagtgatgatgattaacaccttctggagccagctcatcagctcagagcccagggtcaggagttcgttcagtaacgcagcgggaatcaatctgcactgacaccgcggcaggaactgaagctgccctggcaagtgaggaaccaggagccgtcactgagtgtggctgggctacatcatagctcatcacggagctacgactttgggtactgcggacagacctggataggcccagcattcgttctgaagatcacagttcacagaagcttttgcttcgtnaaga

SEQ ID NO: 1352 - DNA, 555 bp, Homo sapiens
ctgccagcacggctagaataaagcaggcaaaagaaggtggaaagagcagactggctgagtcttctggcctccatctttctctcgtgctggatgttcctgtcctcaaacatcagactccaagttcttcagcttttggactcttggacctacaccagtggtttgccaggggctcttgggcctttagccacagactaaagactacattttttttttcggctttcctacttttcagatgtggggacttggactggattccttcctccttagattgcagacggccaactgtgggacttcatcttgtgattgtgtgagtcaatacttctcaataaactctccttcatatacatatctgtcctattagctctgtccctctagagaacctgactagtacaccactaatgtttttactcatgaggaaatgtaaatgtgaaacagaattcaagaatcaatgctcacaaaaaatgtaagttaataaataatgaagttttagtagaaatattgaatccccattaggaaagaaattattgtaatcttggcaaaactatacaccattaa

SEQ ID NO: 1353 - DNA, 310 bp, Homo sapiens
  misc_feature 223, 224: n = A,T,C or G
ctgcctatttccacatctttcaatccatctggctccttaaataggggaaaaagcccttatttggtggagaagcatttccaaaatgaagttacaggttctattaaaacttactgtcacatcaactgttaaaatagggccttttgtgttttgttatttcaccttaatatcaccagaattcctgtaattccacaattgtgattttactatgtagaagataattcannttctagtctattgctttagatgtaaaaacagccaaccttcccgccagactacggcttccccgaacgcaaggagcgcgagatggtgg

SEQ ID NO: 1354 - DNA, 522 bp, Homo sapiens
ccacagcacagaattttatgtgaggaactcagatttttgaagacttaacaattgcagagaaaggttgcagcctgcacaccatagcccacctctctgagcagactttggttttgtgtggtgacgtggcacatgtttgtacactgggatttttcaaaggacgctacgcgagcagactgacttgcctcttctgtgagcactgtggcttttgtcagatggagtgccggtctgcagaggactgctctttcgaatccacagtgttatctgtgtaaatagctttaatttttcttctgtgtcttaggtgaagttttgttcatgtagcaaccaggtagacagtgaccaaataaggctgtaaatgtgctgtagttttctactgtgatgtacttgaaggagaacctgtgtcctctacttttctgatctcccacaagtattttgtgtttgtttcctgagtcctgaggttattattttactcctgttttgcccccagttttctttgttttttttctggagacccagggaggccca

SEQ ID NO: 1355 - DNA, 213 bp, Homo sapiens
ccagcagttcctctttgccttatatttgtggtacgcccggccagccttcaagatgggtttgtcaattcggccacctccagccaccacaccaaccacagctctgttggctgaggagataaccttcttggagccggagggcagcttcacacgggtcttcttggtctcagggttgtgggagataacggtggcatagttccctgatgcccgggccag

SEQ ID NO: 1356 - DNA, 494 bp, Homo sapiens
  misc_feature 254, 342, 404, 480, 486: n = A,T,C or G
cctaagctctaggacggtgaatctcggggctatttgtggatttgttagaaacagacattcttttggccttttcctggcactggtgttgccggcaggtgggcagaagtgagccaccagtcactgttcagtcattgccaccacagatcttcagcagaatcttccggtaatcccctgaagtatctcccgagatgtcgtggtacagcgacttgccgttttgtacaagctttttttttttttttttttttttttttagnaaatagtttattcatccagcagtttcagccctgatactgaagcctgttgcggggtttcttatttttctggctggagcctgattatganaacatggcctcaccacggggccagcgctcaaattcctgccctgccgatcatccagacatcanaggaaatgagagtattgctcaaatgagggagactggagctttattaaggaaacaaaaaataccagtaagactaganaggggnggttaatg

SEQ ID NO: 1357 - DNA, 403 bp, Homo sapiens
  misc_feature 36, 38, 63, 68, 77, 89, 92, 102, 126, 210, 237, 293, 337: n = A,T,C or G
caagcttttttttttttttttttttttttttttttngnataaatagactttattgaagtcagngcctntgtactganacagaagattgngtntacataagcncaagttgtaacatttcacaacttntaaaaggaatgtcaacaattacaacgatcatgcataccatggtcgataatcacattttaaaagcattttcaaccatttctaaanaaatgcttataacattgttatatatanaactactttcaataaactgcaaaacattgatcgacttttccagtatgagctacagngtcaacacaaaagggaggcataaatgtttaatttatgaaatcanaatggaatatttactgtaaagaaaaattaaaaagctttcaaataaaggccattatcgaaccaacgt

SEQ ID NO: 1358 - DNA, 617 bp, Homo sapiens
  misc_feature 578: n = A,T,C or G
ctgaaaatctgaaattaaaagcatgctagaaatcctaaatgcaatcttttggaagtctgctattaaaaagcctttaaggatttactaacttcgagtctaagtgcaaggggacgaaagcttaagcctgtcagacattccttttcttggacaaaaagatcaaagtttcctacaaattgctaagctttgcacaagggagaagcctacatgtactagtgcatggaatcagtttcatcttatttcatggggactcttctcccactggaaagaaacagaatgaggaatgaatcttaattggtctcttcatcagaagtggtaaacttggtctctatattcacgaagtcagacagttttttaagcagactgtggaagcagacagaaccagcttcctgtagccacagaccactacatggtatctaagctaaagcaaagatgaacaattatccagattcacttgaactgtactaaagggcaaggttcaccactacaaaagggaagttgtctaaaagcaagaattcaattaacgctgggtaagaaaagtcaaaacactaatgagttgtccatgaagccaactgctaagnacgcgctcaactatacgcgacatgaagacactatgcacg

SEQ ID NO: 1359 - DNA, 483 bp, Homo sapiens
aaaattaaaaaacgaaagaaaaaatagctgggtgtggtggctcacacctgtaatcctagcactttgggaggccaaggcgggtggattgcctgagctcaggagtttgagaccaacctgggcaacatggttgaaaccctgtctctactaaaacataaaaaaaatcagccaggtgtggtagcgtgcacctgtagtcccagttacttgggaggctgaggcacaagaattgcttgaacctgggaggtagaggttgcagagatcatgccactgcactcccagcctgggtgacagagcaagactgtctcaaaaacaacaacaacaacaacaacaacaacaaaacaaaacaaaaaaaacctctcaaaaaaatgaaaaaaaatttaaattaaaaaaaaaaatgctgggtctgatggctcacacctgtcatctcagcactttgggaagctgaggcaggcagatcacaaggtcaggagatagagaccatcctgg

SEQ ID NO: 1360 - DNA, 528 bp, Homo sapiens
  misc_feature 526: n = A,T,C or G
gctggagcccaccaagctgtcactgctgcactcactctgcaagggatcaggaccagcaacctttatattctagattctaagacattgtacagagaaattcagaagtgtaaaaatattgcacattgacaaataccaagaatttttgcgtatgtttatattgtattgttctaaataatgggtagcctgtgaaataagatcttgccacccatgtaataatagtagtaatactatagttaaaatggctgtaagaatagttttataaaagtgaatacacagatctattgtatttgaaacataactttgacaattattagtgtgaccaaagtattaggcggttttcatacatttttcaccttgtacaaaattatgaattcatttttcctccaggccgacaaggagttgtagaatgaaaatgccctctaagtgttattttggttgttctaacttacaaaagtgattttgaataagaaatatttggtgttctttttataaccagtttttgattggtaattgttttctgtattgntt

SEQ ID NO: 1361 - DNA, 490 bp, Homo sapiens
ggagcagtcccagccttgtgcagacaatgctgtgctttccagtggtctcacggcagcacgatgaagactggaaagcgacgggtctgttgcggttctcccacttttccataagcagaacaagaaccaaatcaaacgtcttaacgcgtatagagagatcacgttccgtgagcagacacaaaacggtggcaggtttggcgagcacgaactagaccaagcgaagggcagcccaccaccgtatatcaaacctcacttccgaatgtaaaaggctcacttgcctttggcttcctgttgacttcttcccgacccagaaagcatggggaatgtgaagggtatgcagaatgttgttggttactgttgctccccgagcccctcaactcgtcccgtggccgcctgtttttccagcaaaccacgctaactagctgaccacagactccacagtggggggacgggcgcagtatgtggcatggcggcagttacatattattatttt

SEQ ID NO: 1362 - DNA, 221 bp, Homo sapiens
ccaacatagaacttggataggaaatcctttggccttggcgcttctgtttcatggaagaaccgcataacatgtgtccgctgcttccatactttaattgtttcttccagttcgatctttcccttaatgaccagaagatcaaccaccctggggtctgtgacatgggcattcttcataaacatttctcggactttatcccgtcccattttcacagtgatgtccag

SEQ ID NO: 1363 - DNA, 482 bp, Homo sapiens
aaattctctggatgagcaagaaggggttaaaagtggaatgtatgttgtaatagaagttaaagttgcaactcaagaaggaaaagaaataacctgtcgaagttatctgatgacaaattacgaaagtgctcccccatccccacagtataaaaagattatttgcatgggtgcaaaagaaaatggtttgccgctggagtatcaagagaagttaaaagcaatagaaccaaatgactatacaggaaaggtctcagaagaaattgaagacatcatcaaaaagggggaaacacaaactctttagaacataacagaatatatctaagggtattctatgtgctaatataaaatatttttaacacttgagaacagggatctgggggatctccacgtttgatccgttttcagcagtgctctgaaggagtatcttacttgggtgattccttgtttttagactataaaaagaaactgggataggagttagacaattt

SEQ ID NO: 1364 - DNA, 442 bp, Homo sapiens
ccttgggcccagatgagccagtacagactccagacagaggggcccttggggccctccaacctcaggtgatgagctgagaaagatgttcacgtctaagcgtccagtgtgcacccagcgctccatagacgcctttgtgaactgaaaagagactggcagagtcccgagaagatggggccctggctttccagggagtgcagcaagcagccggcctgcagacccagcctgaccaacgatgagcatttcttaggctcagctcttgatacggaaacgagtgtcttcactccagccagcatcatggtcttcggtgcttcccgggcccggggtctgtcgggagggaagagaactgggcctgacctacctgaactgactggccctccgaggtgggtctgggacatcctagaggccctacatttgtccttggataggggaccgggggggcttg

SEQ ID NO: 1365 - DNA, 414 bp, Homo sapiens
aaagttgctttgctggaagtttttataaggaatctcaaattaaacttttagaagtttaattgacactaggaagccaaaccaaggctgacttcagactttgtttgtagtacctgtgggtttattacctatgggtttatatcctcaaatacgacattctagtcaaagtcttggtaatataaccaatgttttcaaatgtattctgttatacaaagagcagatttttattgaacttgtgcaataactatattcccatacaatataaatattcatgaatagtttcccaagtctggagcgaccacatagggagaaaatgtaaatgtctcaatttttgttcacaaaagtatattttatcaaattgctgtaagctgtggatagcttaaaagaaaaaaagtttcctgaaatctgggaaacaag

SEQ ID NO: 1366 - DNA, 502 bp, Homo sapiens
ccagtttgttctaggatgcattgcatcagacatcacagtacatgaagaaaatctgctttttgtgaaaagccaccaggcattttagatcccgtttaccatgaagtgcagacacagcagatacccagataatacagtcagtgcaaaagtcaaatgagtaagtcagctctttgatgaggctggctacactgcaaaatataaatgaaactcgaaaatagaaggtaaggtctatttacaaaagtttgtttagtaaagtgacttgaaaaaagttgttaaccacttcccaggcatccctcccctctcccaccaaaacaaacaaacaaaaaacaacaacaacaaaaaccctgaaaattatcttgaaagtcaagttaaaactatgtggtgaaaaagagagtgcttgttccaggtaaaggacttcaagataatttacaggcagatttatttttattagtaaaagtcacaaataggaaaagacttattggctgactttgagctgtgtgctttt

SEQ ID NO: 1367 - DNA, 411 bp, Homo sapiens
ctgtcagggattcacagttgagcttttgggcacctgctgagtgggctctatcaggttggtggcactgggccatctgggggagtgaatgacctcagagcttcttcccaggaatttggatttattttagaagagaaagctgctttgcctgtcccttctcctcctctgcttctccttttaacaccaactgtatttagatgaagactgccccccaccaccgtccccgttccatctgtctttcttacaccagtaatcctgtaaatgtgtatttttctccctttcatgtgttgattcaacccttgaggttggtgggacattgcattagactcacggcttcttaatagtactggactttggtttctgttttgtgttccatacggagaggtctcttcctttctgagtttccgcatgcag

SEQ ID NO: 1368 - DNA, 255 bp, Homo sapiens
gacacactaacatttataccaaattgcagattattctgcagagagggaattgcatgtttgtgttgtatatttagtatgaacttttttcagaatataatatttcttagttatcaaaagtagttggaaaacatttgcaagactatgaacatagaattgctgcttttatattttaactgcagattgtgaatttcactgccttatattatttatttctgaaacaaaagaggcatttttcaataaaactactgaaaattt

SEQ ID NO: 1369 - DNA, 63 bp, Homo sapiens
ccttcgagaagatccctagtgagactttgaaccgtatcctgggcgacccagaagccctgagag

SEQ ID NO: 1370 - DNA, 402 bp, Homo sapiens
ctgtttaaaatgactgtctgactcaccatggtaatttttcacaaattaaagacacattttgggttgtgcaacagtgtcctcatctttccaggcaggcagattattttaatgctgttatacagggaattgggactctcggattttcttttttaacctttttatgcctttcagtaggggaagtttccttgaaagagagctgcaaatctcttaagtatcaacgtaaagaagccgatgacccaattcgggaggtggttcaagtgttctgttcgtttacaaaagcacagaccacgaccatggacacacccagtggaagtaaccacacctggtgtgttcctagaagctcacctgtgacagttcaacaagaacttactattccagaaaagtattacacaaagttatttt

SEQ ID NO: 1371 - DNA, 456 bp, Homo sapiens
aaaaaagcacctccttaccccatatcacgtttctctgacaggtgttaaagtaggcaatgagtatgtcaacagcttgagcatcagcgtcttgcaaggacttcagaccaaccactcgccaaaaatcttggcagcttttttatcttgtttttaatacaacggtacatccactctgatggcaaacctgtccagccacatctccacaacaagctttgcaaaatcagtgattagcaaattagttagctttggcacggagctgtgctcgcttgcccgtgacagcctggaagccggttttgatactggcaacagaacatctagaatgacaagtttcgcactgtaggaaatagagtcgtgtgtccttctgcaggattgtgtccggtgatcggcatgtgtgacaagtgacatattccttgatatatcttctcaagacattttctatctgtttctgttggaatcttc

SEQ ID NO: 1372 - DNA, 327 bp, Homo sapiens
aaaggagactggatatggagtgaagacacagtctattaatgtactgagtggagtatgggtagcctatgaaaatcctgacttcacaggagaacagtatatactggataaaggattttataccagttttgaggactggggaggcaaaaattgtaagatctcttctgttcaacctatatgtttggattctttcactggcccaaggagacgaaatcagattcacttgttttcagaaccacagtttcaaggtcacagtcaaagttttgaagaaacaacaagtcaaattgatgattcattttctaccaagtcttgcagagtttcaggaggcag

SEQ ID NO: 1373 - DNA, 483 bp, Homo sapiens
ccattaaaagttatttacaacagtgggagaaaaaaagacaagaagttgtttcacattacagacctccccccaccccaaagcctaatacttgcttaccaagtcaaaaaagagacacagttgattcacaggctggaggtttgaacttgagtaagacatttataaaaacctagacggggcagtgtcctccccagcccaggtgccactaggcacagcacaagagactaaaaacaacaggggaaggctggacactcaaggtttgggagtataagcaccccacttctggctcagggatttggggagtagggtaaacaaaacctacttggaaaagaattggggaagaaaaccaacaactgccttatgcaggggtggggacagggaaggaggtagggccagggacaggagcatttcacatcactaacctaacttgggaagctgtaagggaccatcttcaactggccttaagaggagaaccagatggctgat

SEQ ID NO: 1374 - DNA, 270 bp, Homo sapiens
ccagagggaagtggatgcggggatagggcaccaggttggtctggaattctgtcaggtcaacattcagggctccatcaaatctcagggaagcagtgatggaggacacaatttgacctattaacctattcaggttagtataggttggacgctcaatatcgaggtttctacgacagatgtcatagatggcctcattgtctaccatgaaggcacaatcagagtgctccagggtggtgtgggtggtgaggatggagttgtagggctcaactacag

SEQ ID NO: 1375 - DNA, 558 bp, Homo sapiens
ccaacagagcaagaccgtgtctcaagaaaagaaaaaaaaaagttcaaattctttagaaaacagcataatttgtagcccgtgtgatgccaataggaattgtcaaggaagtgcccgtccaagtcatggaagatgatgttatggtacaggtgtgagagcaaccactgaaggagattctgggaaggccaaaggggagggcgggctgaggggtgtccattttaagggttaacttgccggaaacctcaggccgactttccagagcagagggcctagctttctgcccttccccctgcaggagccaatttagtcaaaagaaagcaaactctggattggggggtgcaaaaggagacgctggctggcaaagacctggcacactcatgcctaccagctttttacgtggctctaaacttcctgagcccacccagaattccaactgggtgagtcctagcagcctcttagcacacagcaagagtcccccactcgctaatgggaccgagcccaaagcagatcccctttagatgtggagtgggtcctatccctccagcccctcggaatcatgat

SEQ ID NO: 1376 - DNA, 456 bp, Homo sapiens
ctgctcattgcccccttcaaagaggaggacgagtgggacagcccgcacatcgtcaggtactacgatgtcatgtctgatgaggaaatcgagaggatcaaggagatcgcaaaacctaaacttgcacgagccaccgttcgtgatcccaagacaggagtcctcactgtcgccagctaccgggtttccaaaagctcctggctagaggaagatgatgaccctgttgtggcccgagtaaatcgtcggatgcagcatatcacagggttaacagtaaagactgcagaattgttacaggttgcaaattatggagtgggaggacagtatgaaccgcacttcgacttctctaggaatgatgagcgagatactttcaagcatttagggacggggaatcgtgtggctactttcttaaactacatgagtgatgtagaagctggtggtgccaccgtcttccctgatctgggg

SEQ ID NO: 1377 - DNA, 397 bp, Homo sapiens
ctgttaaagattccccaaagcatctgagacaccatctggggtgcagcacaacagaagacgtttaagatgggaccagaaagaagaatgtatagctcttctctaaataaacgaatggtctgccccaagccttcaggaaggagaatggtctatggtgactggggaaagttctctttgccctcccagcactctgatgtcagagtagtaggttaagggtggaaggttgacctacttggatcttggcatgcacccacctaacccactttctcaagaacaagaacctagaatgaatatccaagcacctcgagctatgcaacctctgttcttgtatttcttatgatctctgatgggttcttctcgaaaatgccaagtggaagactttgtggcatgctccagattt

SEQ ID NO: 1378 - DNA, 333 bp, Homo sapiens
cctacagacttatttcttcttggacacacccacggtgcggccacggcggccagtggtcttggtgtgctggcctcggacacgaaggccccagaagtgacgcagccctctatgggcccgaatcttcttcagtcgctccaggtcttcacggagcttgttgtccagaccattggctaggacctggctgtattttccatcctttacatccttctgtctgttcaagaaccagtctgggatcttgtactggcgtggattctgcataatggtgatcacacgttccacctcatcctcagtgagttctcccgccctcttggtgaggtcaatgtctgctttcct

SEQ ID NO: 1379 - DNA, 463 bp, Homo sapiens
  misc_feature 31, 43, 53, 60, 73, 123, 139, 144, 152, 169, 246, 311, 316,334, 337, 354, 373, 418: n = A,T,C or G
ttttttttttttttttttttttttttttttnaaagcaaatttnttttaatganaactcanaattaaacttcanagggacccaacgtcatacttccattcagggacttgatacaaaaaatttantttgaactgctattancaggnggcagganccaccttcaaatgaatnttcaaattggaaaatactgcttcaccacctgttggggataagttgcaaatggaataatttagtatggtttgtagctnttttgatgaccacctcgcctggataccttcccataaccactctgctggtcaccaccttttccacnagctnttcctgcaaatcctcctntanatccccactgttgctgntgctgatattgttccttcnacatggctacttttatttcacatttactaaaaccaacattggggnatttcttttccattatcttcttcactggttcttcttccttaaagg

SEQ ID NO: 1380 - DNA, 199 bp, Homo sapiens
cctgtgccgggccccagggctggcagccaccagctcctcttccaggcatgggggacaccctgacaggatccggaagtctccatttacccaaaaatgcaagagccatgatcagtcatggcgacactgcaggcggtactgagtgaccatgtccagtccggctccgtccctcccacacgggggacaagcttctccgaggagg

SEQ ID NO: 1381 - DNA, 216 bp, Homo sapiens
aaagtagagataatttactgaagcgtctctgacaatctaacttattagacagcaagcaatatataatactgaaaaagtattcagaaatggaaaatttacatcatataggttatttaacttgtgttcagcctttttgtaacttttttgaaagtgcaaacaattctttggattattaaataaggtatacagtatgcatggtttctcaaatttagcttt

SEQ ID NO: 1382 - DNA, 466 bp, Homo sapiens
ctggaggccgaggagcaggggaagcagaagaagcggcagagtgtgtcgggcctgcacagataccttcacttgctggatggaaatgaaaattacccgtgtcttgtggatgcagacggtgatgtgatttccttcccaccaataaccaacagtgagaagacaaaggttaagaaaacgacttctgatttgtttttggaagtaacaagtgccaccagtctgcagatttgcaaggatgtcatggatgccctcattctgaaaatggcagaaatgaaaaagtacactttagaaaataaagaggaaggatcactctcagatactgaagccgatgcagtctctggacaacttccagatcccacaacgaatcccagtgctggaaaggacgggccctcccttctggtggtggagcaggtccgggtggtggatctggaagggagcctgaaggtggtgtacccgtccaaggccgacctgg

SEQ ID NO: 1383 - DNA, 92 bp, Homo sapiens
aaaaaagtgacatttgctttattactattggcaggtggggcctgcatgaggtggttagtgtgctcaggggatgggtgggctgtggagatgat

SEQ ID NO: 1384 - DNA, 150 bp, Homo sapiens
ctgtcctgagctaacactaaaagtcactgggtatttggttaaaggtctcccacaagactggtattctctttgcctgaagaaacaaggcattgaatctctaaaatgctgttctcaatcattgtcagagatgttttcagttgcagtcagaag

SEQ ID NO: 1385 - DNA, 465 bp, Homo sapiens
ctgttttcctcaaaatctctggattctccaatatgggatagcgggtctttaagtcgatgaggaagccctcaaatggtctgtaaggattgtggacaataaggtggaaattaagttgctgtataagaagtagttcatattccagtatctgttcaagtgccttctcctgtccaagaggactctcccggaggtttccaacaaactgaggactagatacattgaattcatctactttgcaggccaaaaatgcacaagtgagcattattatcctggggtgatattccattactgagttattaagataaaaacgtttgaaatacatacaagccgtacccacaacagatcttggcattgctggcttaaacaccgaacagaattccaataaccttttctcatagtatttgcagagtgtcatttcttcatgaggctcaagaaagactggatcattcggaagaaccttcccgttgg

SEQ ID NO: 1386 - DNA, 502 bp, Homo sapiens; identical to SEQ ID NO: 1366

SEQ ID NO: 1387 - DNA, 534 bp, Homo sapiens
ctggacagatccccttcccacctgccagcactcaagagccactacaccttggaggtgctccagccaatttgacgacactgaggatccctgtgtggaaatcattctttggctgtctgaggaatattcatgtcaatcacatccctgtccctgtcactgaagccttggaagtccaggggcctgtcagtctgaatggttgtcctgaccagtaacccaagcctatttcacagcaaggaaattcaccttcaaaagcactgattacccaatgcacctccctccccagctcgagatcattcttcaattaggacacaaaccagacaggtttaatagcgaatctaattttgaattctgaccatggatacccatcactttggcattcagtgctacatgtgtattttatataaaaatcccatttcttgaagataaaaaaattgttattcaaattgttatgcacagaatgtttttggtaatattaatttccactaaaaaattaaatgtcttttaagaaacattcttttccacttgttaaaaaaatta

SEQ ID NO: 1388 - DNA, 475 bp, Homo sapiens
ccactagaggtctgtgtgccattgcccaggcagagtctctgcgttacaaactcctaggagggcttgctgtgcggagggcctgctatggtgtgctgcggttcatcatggagagtggggccaaaggctgcgaggttgtggtgtctgggaaactccgaggacagagggctaaatccatgaagtttgtggatggcctgatgatccacagcggagaccctgttaactactacgttgacactgctgtgcgccacgtgttgctcagacagggtgtgctgggcatcaaggtgaagatcatgctgccctgggacccaactggtaagattggccctaagaagcccctgcctgaccacgtgagcattgtggaacccaaagatgagatactgcccaccacccccatctcagaacagaagggtgggaagccagagccgcctgccatgccccagccagtccccacagcataacagggtctccttggcag

SEQ ID NO: 1389 - DNA, 399 bp, Homo sapiens
cggaaaatagcctttgccatcactgccattaagggtgtgggccgaagatatgctcatgtggtgttgaggaaagcagacattgacctcaccaagagggcgggagaactcactgaggatgaggcggaacgtgtgatcaccattatgcagaatccacgccagtacaagatcccagactggttcttgaacagacagaaggatgtaaaggatggaaaatacagccaggtcctagccaatggtctggacaacaagctccgtgaagacctggagcgactgaagaagattcgggcccatagagggctgcgtcacttctggggccttcgtgtccgaggccagcacaccaagaccactggccgccgtggccgcaccgtgggtgtgtccaagaagaaataagtctgtagg

SEQ ID NO: 1390 - DNA, 372 bp, Homo sapiens
ccactaacagacctgatactttggatccagcactgatgaggccagggagattggatagaaaaattgaatttagcttgcccgatctagagggtcggacccacatatttaagattcacgctcgttcaatgagtgttgaaagagatatcagatttgaactgttagcacgactgtgtccaaatagcactggtgctgagattagaagcgtctgcacagaggctggtatgtttgccatcagagcacggcgaaaaattgctaccgagaaggatttcttggaagctgtaaataaggtcattaagtcttatgccaaattcagtgctactcctcgttacatgacatacaactgaaccctgaaggctttcaagtgaaaacttt

SEQ ID NO: 1391 - DNA, 466 bp, Homo sapiens
ctggtcaccttacgcaagagccaggctgaaacatcccctccatactcagctctttaacttttcttttcctttttcatcgggctctttcctaaaaagctgagctgtaaaatattttacatcgaggtataataaataatcatgtacatgttttaccaccacccaggtcaagacatagaatgtttcaacatttccatcaccccagaaactccccttgtacccccttccacttcgtctcccctagctcctagaagcaaccactgatgtgatttctaccaaatccagttttggtcctactaaatatactcttttgagactggcctcttttactcaccataatgcctttgtaattcatccatgctgttgtgtgtatcagtagtttgttccttttcattgctgagtagtattctattgtagagatgtaccacagtttgtttattcttctgttgatggacgtttgggttgtttc

SEQ ID NO: 1392 - DNA, 156 bp, Homo sapiens
aaagtcgttttgggaactgtgatgtgatgtggaaatactgatgtttccagtaagggaatattggtgagctgcatatataaatttgacagatagctatttacatagccttctaagtaaaggcaatgaattctccatttcctactggaggatttattt

SEQ ID NO: 1393 - DNA, 480 bp, Homo sapiens
  misc_feature 27, 56, 343: n = A,T,C or G
ttttttttttttttttttttgaagcanaaggaactctttattggaaagtggatganagaggcagctccagccgtgggcatcctgaatgggaggaagaatggacagtgtgggaaggggaagggcagcagggacttaggaccagatggggcctgtagctctggggacggcacaggtgcagcaaggaccggctccctctcactggggaacgaaacaggccatcccgcaagagccttcacagcacttcttgattcctgggcagtcagtatctttcaagcagcggttagggggattcaacatggcgcaccggatcaagataatggggcaggagccaggcttagtgganactggacctttgactggctcttgcgctttgactttatctcgacctttaactgaaacttgtcctttaacgggatcttgtccattgaatggaacacggcctttgacagtgtcttgacctttaacaggaactcccgtgac

SEQ ID NO: 1394 - DNA, 487 bp, Homo sapiens
cctctgtcctccctcttctcaaagtcccatgattctgtcaaggtaatattgccaataatcattcacatttcacgtggttttagacacgcaggttattcagacagacacagacaacaaaacaagcctcaaagccagaacaaaacaaaacaaaacaaaatcgaacataggtataaaaggtaaaatatatgtacaaagtacacagtacgtgaggtatacacggcattctcacaatgcatgttagtagtttgcctaggcatagcccttaaagatgactgcctgtttttgtgccatttctcaaaatacagtatattttgtttacccgtttaaccacctgatttcagcactgtccaagacagttactgatatttcatctgaatttgttttttaatgaaagttgcaatttctccattaagctccatcttttgtaggggagtgagtttccatctctggacatatctaacagaggctggattcccacctacaaaag

SEQ ID NO: 1395 - DNA, 256 bp, Homo sapiens
ctgaaaagcaacaacaaaagggtttggttgcaacagccagtgtgggtacctctggggagagaggacctcctctgacaaactggtctggtacccaccatgtgccaggatccaccctggcctctttttacccactgactccccagaacaacccttccaggcttctcttgtcatctttctctgcctgaggggaaactgaagctctgaaatgcgatgtgatctgtaccaggtcacccagctatgctgcaaagtgggttgg

SEQ ID NO: 1396 - DNA, 564 bp, Homo sapiens
  misc_feature 536: n = A,T,C or G
aaagcaaaagagacatcctttaataactgtataaaatccaggcagttccattaaaggggttaagaaaaccaacaacaacaaaaagcgagggactgtctgttgtcactgtcaaaaaggcacttggagttaatgggaccaggattgggggactcttagctgatacagatttcagtacgatttcattaaaaggcttggatgttaagagaggacactcagcggttcctgaagggagacgctgagatggaccgctgagaagcggaacagatgaacacaaaggaatcaaatctttacaaccaaattgcatttaagcgacaacaaaaaaaggcaaaccccaaaacgcaacctaaccaaagcaaaatctaagcaaaatcagacaacgaagcagcgatgcatagctttcctttgagagaacgcataccttgagacgctacgtgccaacctaagttctcaacgacagcttcacagtaggattattgtgataaaaatgactcaagcgatgcaaaaagtttcatctgttcccagaatccgagggaganctgaggtgatcgttagagcatagcgaca

SEQ ID NO: 1397 - DNA, 305 bp, Homo sapiens
  misc_feature 238, 266: n = A,T,C or G
ccttgttgcattcatgattcttttcacaagcacctggatcttttcctaaggataaaaagaggcacaaggagacaaaaggctttggagggaaagaaaatatcttgttgtgaccatgtgctgttctgaaacaagaaggaaaagcatgtgggcattgaatggctgcgatcaaagaccgcatggtgacagcaccctggaaagacgatgtcacttccacgaggacacctgcccgggcggtcgnccgggcaggtctggtaggggcggccganacaccacccctggagtgatggaggaggaggatgtcattg

SEQ ID NO: 1398 - DNA, 304 bp, Homo sapiens
ccaagggagatgttacagcccagatagctcttcagcctgcactgaagttcaatggtggtggtcatatcaatcatagcattttctggacaaacctcagccctaacggtggtggagaacccaaaggggagttgctggaagccatcaaacgtgactttggttcctttgacaagtttaaggagaagctgacggctgcatctgttggtgtccaaggctcaggttggggttggcttggtttcaataaggaacggggacacttacaaattgctgcttgtccaaatcaggatccactgcaaggaacaacagg

SEQ ID NO: 1399 - DNA, 460 bp, Homo sapiens
  misc_feature 449: n = A,T,C or G
aaatgtttgtgtgggtggtctgtgtagttactccccatacaacaaagctgacaaaatttttaatttacacaatgtattctgcattttcaaatgtttatgttgtgtatatagcaaagaaattatcttactgatatgcgttgaccaaatcccatggagaaaagacatctcatttgaggttccccttcctctcatgtgtttgattttttggaaggtgatacagtatgtgggtaaccatgcaaatgtttatgaataactttactgaagtgattccatccgtattctgttctaatacttggagaatgaccttcatatttatatattttatttctttgtttcaactatccagtgataattcaggaaatgtttccttttttttttttttacaaaaactttttatttgtaaaatgtttgtaataatgtaaaggtgaacatgttcaataaaaatcatntattaaaagtt

SEQ ID NO: 1400 - DNA, 469 bp, Homo sapiens
cctggctgggcctccactgttgaggtcatcatggtgcttccgctttattctgattaacttttggttacacacattgaaaaatgacctaagagagttgttttgagtggcgctttttctcattgtacagctcctgctagcagtttactgcaacactgatttctctggaacctctcagtttccagtcatcattagggctgttactagcaaggacctacaagccagcctcaaaatgtgagagggctgccgacagtcttcctgtggttagctgccacagtgcccagggaccatcttccctctcctcctcccccactgccagctcctgttccagccgcatcagttcctcatttgagagatcttcttcatgggactgcagcaactggtccacagcagcctcagcaacctcttcaaaggccacatttctggcaagggtcacaatgtttttttgaagctgtgcaatgttatctgcctg

SEQ ID NO: 1401 - DNA, 372 bp, Homo sapiens
ctgggaagtctgtgcccccatccttctgccaggctatctggggggctgggtgccccacagcagcacactccaagcgtgccatggccccagctcggatggtgagatccatgggggtcttggtgaatgagggaagcatatttactgtaagcttggctttgacagagtaggatgaaccaaagtgattggagatgacacactgatatttcccctcactggcaaattccacctcgcgcagccgaaggatggtggtatactccatcacctcgccaccttgggcccggaggtgtgcataattttccatttcagcatcatgcagtagttcattgtcttttttccaagcaaaagtcattggggaatcactgctgctggcag

SEQ ID NO: 1402 - DNA, 542 bp, Homo sapiens
gaacaattgtctctggacggcagctatgcgactcaccgtgctgtgtgctgtgtgcctgctgcctggcagcctggccctgccgctgcctcaggaggcgggaggcatgagtgagctacagtgggaacaggctcaggactatctcaagagattttatctctatgactcagaaacaaaaaatgccaacagtttagaagccaaactcaaggagatgcaaaaattctttggcctacctataactggaatgttaaactcccgcgtcatagaaataatgcagaagcccagatgtggagtgccagatgttgcagaatactcactatttccaaatagcccaaaatggacttccaaagtggtcacctacaggatcgtatcatatactcgagacttaccgcatattacagtggatcgattagtgtcaaaggctttaaacatgtggggcaaagagatccccctgcatttcaggaaagttgtatggggaactgctgacatcatgattggctttgcgcgaggagctcatggggactcctacccatttgatgggccag

SEQ ID NO: 1403 - DNA, 496 bp, Homo sapiens
ccttatttctcttgtcctttcgtacaaggaggaatttgaagtagatagaaaccgacctggattactccggtctgaactcagatcacgtaggactttaatcgttgaacaaacgaacctttaatagcggctgcaccatcgggatgtcctgatccaacatcgaggtcgtaaaccctattgttgatatggactctagaataggattgcgctgttatccctagggtaacttgttccgttggtcaagttattggatcaattgagtatagtagttcgctttgactggtgaagtcttagcatgtactgctcggaggttgggttctgctccgaggtcgccccaaccgaaatttttaatgcaggtttggtagtttaggacctgtgggtttgttaggtactgtttgcattaataaattaaagctccatagggtcttctcgtcttgctgtgtcatgcccgcctcttcacgggcaggtcaatttcactggttaaaagtaagagacagac

SEQ ID NO: 1404 - DNA, 479 bp, Homo sapiens
ctggtctttaattatgtggttccgaagcaaattccttgtatgggcatcaattggaggggttccatctttgaatacagaattcaggggagccaggagggtcaaccgctcacttccagagagatgattgccgaggccggcttgtctgaaaaggtcaatggctgtggacacatcagactctgcagccaattcaaatagtgtcttggctgagtctgggatgagtagctcatcaatgtagtggatcaccccgttggtggctaggatgtctttattggagatgatcgccttcccgttgatagtgagcatgtccccgctgcagcccacctccagtgtcgtgccctccagggtctctacagacagccccgcaacgatggcttcagcacacatagctgacttcaagatgtggttgttcagcaggtctctcagggcttctgggtcgcccaggatacggttcaaagtctcactagggatcttctcgaagg

SEQ ID NO: 1405 - DNA, 362 bp, Homo sapiens
aaatggagcttcctcgaaccttttaattgaagcctagcttcaatgttgaatgaggaagcaaagtatctcattaaaaagttggtctgcaaagcacaaagctggcctgcaaggggacttgaaggaagcaggctgagtgtttgagtagtgagatctttgctttgctctttagatccttcagtaagctaaggtccttttacctgaatggatgtaatttagcctagttttcccataaaataatgtaatggataattcttattgactagggattacacttcatgtgaaattcctcagtgacattcagattaattccagtgtccacaatttaagcaactttccataggaaattaaaatcccaaatccaa

SEQ ID NO: 1406 - DNA, 292 bp, Homo sapiens
ctgccagtggtgagacatggccttcaggagctcaggtggctttttaactgcaccatgaagattccaaacttggtggagttcagtgtccacacataacgaatgagaataggtgtcagcagtgtcaaccaggtccgcaaaggggagaataaaaaagctagggtgccgtatgttgcataaagaaagtagcaggaataaacctgccagatgtacagcagtagcataagtaggtgaacaggcataattttcaagtattttctttgatggagatgagacctgaagttgtgaccaaagc

SEQ ID NO: 1407 - DNA, 181 bp, Homo sapiens
ctgacattcgcgttttacgggggcaccagctctctatcacatgtttggtcgtcacccccgatgactcagccatcttctctgctgccaaagactgcagcatcattaagtggagcgtggagagtggacggaagctgcatgtgattcctcgagccaagaagggtgccgagggaaagccccctgg

SEQ ID NO: 1408 - DNA, 380 bp, Homo sapiens
gagcggaggtggtggcggcggaggctttggcagctcgggactgagtgcaagaatcagcatgattcttcagaggctcttcaggttctcctctgtcattcggtcagctgtctcagtccatttgcggaggaacattggtgttacagcagtggcatttaataaggaacttgatcctatacagaaactctttgtggacaagattagagaatacaaatctaagcgacagacatctggaggacctgttgatgctagttcagagtatcagcaagagctggagagggagctttttaagctcaagcaaatgtttggtaatgcagacatgaatacatttcccaccttcaaatttgaagatcccaaatttgaagtcatcgaaaaaccccagg

SEQ ID NO: 1409 - DNA, 508 bp, Homo sapiens
ccagtataatgctatttttaagactatacagtatgtacgtgcacacacacacactgtcatgtgcacagaaacatacaatgtgtattcttatcatcaatggtccaatttaatgaatcacacagattgaaagggttcaagtcttaaagaagttatgagcaccatagctggtgctcagactgtgcatgtatctttggatcaatgagttgttgaaagtctgctgggtgcagtaaagtacagaatacagaacatcaatgtttaatgttaatacggtaggcaaagagacccagtcagtttcctgggttgctttactggacggctgatgaactaggtactctgttcacttggtaaattctcagaagccagattgactctctatgtatcttgttttatcaggattgtttgcatagcttgctaaaaggcacctaagcagcagcatcatctctatgtcttcagtaaattgtggaacatttctaaaatactcctggaagcagagacagtgtggtccttt

SEQ ID NO: 1410 - DNA, 341 bp, Homo sapiens
aaatgttctattacagcattatgcttcatcaccacctgtttctgaatgatttcactttgattagaagcttggagggtgtgttcacgcctaatttctatctgttgctgtttcttcttttgctgctgatccctgagttgctgaaccctttgcaactgctcttgcacactggctgcctgcactgtaaccacattctgaatctggtgagtctgcacagcactgctttgctgaatttggataggtaactggagtttgatttgctggggcacaccactttgctgagcctgtatctgagccacaacctgtgactggatctgagagagaacctggacttgttgttgcag

SEQ ID NO: 1411 - DNA, 566 bp, Homo sapiens
ccaggttttagatattaacctggctgcagagccaaaagtgaaccgaggaaaagcaggtgtgaaacgatctgcagcggagatgtacggctcctcttttgacttggactatgactttcaacgggactattatgataggatgtacagttacccagcacgtgtacctcctcctcctcctattgctcgggctgtagtgccctcgaaacgtcaacgtgtatcaggaaacacttcacgaaggggcaaaagtggcttcaattctaagagtggacagcggggatcttccaagtctggaaagttgaaaggagatgaccttcaggccattaagaaggagctgacccagataaaacaaaaagtggattctctcctggaaaacctggaaaaaattgaaaaggaacagagcaaacaagcagtagagatgaagaatgataagtcagaagaggagcagagcagcagctccgtgaagaaagatgagactaatgtgaagatggagtctgaggggggtgcagatgactctgctgaggagggggacctactggatgatgatgataatgaagatcggggggatgacc

SEQ ID NO: 1412 - DNA, 199 bp, Homo sapiens
ctgggcccgcttagcccaccaggcatgaggccaagggctccactgaccaggaggccgaggtctctaactcttatcttccacagggtccaagagttcatcaggacccccaagagtgagtgagggggcaaggctctggcacaaaacctcctcctcccaggcactcatttatattgctctgaaagagctttccaaagtattt

SEQ ID NO: 1413 - DNA, 444 bp, Homo sapiens
ccatgaattttaattgaatttttgacggggcaagctacgttacattatggcagaaaaaaagtgcaactgacatactacaaagagattttttaagtttaaaaaaagtttggatcttttggatttcttttttttttttggtctttatgtgcttaaataacgctgaattataattagccacacaaataatgagagttttatttttttttctggctcactccaaatcagcctgttaaggtatatttccttctacagcctttcctgattttgcatgttctcattcccaaagtagtctaccttagtttacactcaaaggtagcacttgttgaaactacatgacagaaacaggctgcaaaggtggacaaggggaagcatgtccctcttgtcttgataaatcagtgccacacacagaacccacattttctgagacattatcttcattataga

SEQ ID NO: 1414 - DNA, 198 bp, Homo sapiens
ccagtatgtccccaggattatgtttgttgacccatctctgacagttagagccgatatcactggaagatattcaaaccgtctctatgcttacgaacctgcagatacagctctgttgcttgacaacatgaagaaagctctcaagttgctgaagactgaattgtaaagaaaaaaaatctccaagcccttctgtctgtcagg

SEQ ID NO: 1415 - DNA, 584 bp, Homo sapiens
ctgtttcctcagagggaaaaatcttgagaccagatggtggagctctggagtcagaggaaatgggtgtcttcagcacaaagctgctgcttttacttcagccacttctgacatttttacataccgagcctgagattatgtgattatctcaaatcaaatcactttgatggagataaataatcaaaactgttttatagtcattgatttggtgagaacagtaatggaaaatggtgttgaaggacttctcatttttggagctttccttccagagtcctggctgattggtgttcgctgttcatctgagcccccaaaagcattattactgatacttgcacacagtcaaaagcgcagactggatggatggtcttttataaggcatttaagggtacactactgtgtttcactgaccatacatttttcttagcccctcaagtaatatagcacagagttatgaatgacaattcccctaaccattcctcttcatatctgcctcttccccttaccatcgtaattctccaaactggtcataaaggcactctgtgaagatattggggactgacatcttaagctctcacctggctgcagta

SEQ ID NO: 1416 - DNA, 525 bp, Homo sapiens
gtagtttcttcatttcaggaagactgacagttgttttgcttcttccttaaagcatttgcaacagctacagtctaaaattgcttctttaccaaggatatttacagaaaagactctgaccagagatcgagaccatcctagccaacatcgtgaaaccccatctctactaaaaatacaaaaatgagctgggcttggtggcgcgcacctgtagtcccagttactcgggaggctgaggcaggagaatcgcttgaacccgggaggtggagattgcagtgagcccagatcgcaccactgcactccagtctggcaacagagcaagactccatctcaaaaagaaaagaaaagaagactctgacctgtactcttgaatacaagtttctgataccactgcactgtctgagaatttccaaaactttaatgaactaactgacagcttcatgaaactgtccaccaagatcaagcagagaaaataattaatttcatgggactaaatgaactaatgaggataatattttcataattttttat

SEQ ID NO: 1417 - DNA, 505 bp, Homo sapiens
gttgaaagtttgacaagtgaatgaagttcacatctggaaatcgttgaacatttttcgttcatggaactcaatggctacgttagtcgtttatgcttttcactgttgtggtaggggctttggaagtaaatgccatcaacaatggatacagaagacctggatttggaataagggcaaaatttatttgatggggctgaattgctctgccaggagcatttggtgtgagatgaaatggcctctcttgagactgagctgccaacctggcaattattgtctgctaagggttctctttattcacccttacttggacttcctttcctgtagggaatctcacgtaaaatgaaatcttccctcccccagggtgtccgcaatgttgccagtgtctgtctgcagattggctacccaactgttgcatcagtaccccattctatcatcaacgggtacaaacgagtcctggccttgtctgtggagacggattacaccttcccacttgctgaaaaggtcaagg

SEQ ID NO: 1418 - DNA, 503 bp, Homo sapiens
  misc_feature 463: n = A,T,C or G
gccgaggaaaaccgcgtactattagccatggtcaaccccaccgtgttcttcgacattgccgtcgacggcgagcccttgggccgcgtctcctttgagctgtttgcagacaaggtcccaaagacagcagaaaattttcgtgctctgagcactggagagaaaggatttggttataagggttcctgctttcacagaattattccagggttcatgtgtcagggtggtgacttcacacgccataatggcactggtggcaagtccatctatggggagaaatttgaagatgagaacttcatcctaaagcatacgggtcctggcatcttgtccatggcaaatgctggacccaacacaaatggttcccagtttttcatctgcactgccaagactgagtggttggatggcaagcatgtggtgtttggcaaagtgaaagaaggcatgaatattgtggaggccatggagcgctttngggtccaggaatggcaagaccagcaagaagatcaccattg

SEQ ID NO: 1419 - DNA, 360 bp, Homo sapiens
aaaaacctgtacacagtgtttattgtggttaggaagcaatttcccaatgtacctataagaaatgtgcatcaagccagcctgaccaacatggtgaaaccccatctgtactaaacataaaaaaattagcctggcatggtggtgtacgcctgtaatcccagtgacttgggaggctgaggcaggagaatcgcttgaacccgggaggcggaggttgcagtgagctaagatcgcgccactgtactccagcctgggcaacagcgagactccatctcaaaaaaaaggaaatgtgtatcaagaacatgattatccaggggtattttctaattcagatcatcaaactgattatatagaagagttggcttt

SEQ ID NO: 1420 - DNA, 270 bp, Homo sapiens
ccaagaagctagggctgctggtcttcccctacacacaccagaactgggaagtgcagtacagtcgtgatgctcctctgcccccccggcaagacctcaacgcccctgacctctatatccccacgatggccttcattacttacgtgctcctggctgggatggcactgggcattcagaaaaggttctccccggaggtgctgggcctgtgtgcaagcacagcgctggtgtgggtggtgatggaggtgctggccctgctcctgggcctctacctgg

SEQ ID NO: 1421 - DNA, 467 bp, Homo sapiens
cctgacattcctgccttcttatattaataagacaaataaaacaaaatagtgttgaagtgttggggcagcgaaaatttttggggggtggtatggagagataatgggcgatgtttctcagggctgcttcaagcgggattaggggcggcgtgggagcctagagtgggagagattaagctgaagggaggtcttgtggtaaggggtgatatcatggggatgttagaagaaacatttgtcgtatagaatgattggtgatggcctggatacggttttggatgatttgagaagctaaatggaagatacaaggtccgaataaaaggaggagaaaaatgggtattaaatgtctaagaattgggaggacctaggacatctgattagagagtgcctaaggagattcagcatagtcctgccagcaaagattatttacttcaagagttaagagtggcagtttggggatagcaccaagagat

SEQ ID NO: 1422 - DNA, 585 bp, Homo sapiens
  misc_feature 487, 555: n = A,T,C or G
ctgccgtcttaaagcagatgtgcgcaacagtgtacaggcacacctgccatagcaaattcctaggatacctcagtcctccatgttggtatgcttttcttttcaacaatgtggaaaatgcagtttaccaagaagcttttttggttttccttttaaggtattacttcaaaaaagcaagcgatgagtttgcctgtggagcggtgtttgaggagatctgggaggatgagacggtgctcccgatgtatgaaggccggattctgggcaaagtggagcggatcgattgagccctggggtctggctttggtgaactgttggagcccgaagctcttgtgaactgtcttggctgtgagcaactgcgacaaaacattttgaaggaaaattaaaccaatgaagaagacaaagtctaaggaagaatcggccagtgggccttcgggagggcggggggaggttgattttcatgattcatgagctgggtactgactgagataangaaagcctgaactatttattaaaaacatgaccactcttggctattgaagatgctatttgagagactgncatacataatatatgacttcctagggatct

SEQ ID NO: 1423 - DNA, 284 bp, Homo sapiens
tgggatcctcaaggtgcctgccatcaatgtcaatgactccgtcaccaagagcaagtttgacaacctctatggctgccgggagtccctcatagatggcatcaagcgggccacagatgtgatgattgccggcaaggtagcggtggtagcaggctatggtgatgtgggcaagggctgtgcccaggccctgcggggtttcggagcccgcgtcatcatcaccgagattgaccccatcaacgcactgcaggctgccatggagggctatgaggtgaccaccatggatgagg

SEQ ID NO: 1424 - DNA, 243 bp, Homo sapiens
ctggatcacttcccgcagtccttgggcagcgctttgctgtggaacacgagagctcctcctcaggggcctggcactcaccttctattctgtatgatgtatttggttaaacactgtcaaataatagagatgtgccagatttagattttcttaccctaatctgtttaatattgtaactttattccatttgaaagtgtcaagcccattcagataagctataatctggtctttaaggaacacaacttt

SEQ ID NO: 1425 - DNA, 132 bp, Homo sapiens
ctaagacctacagctacctgacccccgacctctggaaggagactgtattcaccaagtctccctatcaggagttcactgaccacctcgtcaagacccacaccagagtctccgtgcagcggactcaggctccag

SEQ ID NO: 1426 - DNA, 222 bp, Homo sapiens
cctctttttaccagctccgaggtgattttcatattgaattgcaaattcgaagaagcagcttcaaacctgccggggcttctcccgccttttttcccggcggcgggagaagtagattgaagccagttgattagggtgcttagctgttaactaagtgtttgtgggtttaagtcccattggtctagtaagggcttagcttaattaaagtggctgatttgcgttcag

SEQ ID NO: 1427 - DNA, 270 bp, Homo sapiens
ccagagggaagtggatgcggggatagggcaccaggttggtccggaattctgtcaggtcaacattcagggctccatcaaatctcagggaagcagtgatggaggacacaatttgacctattaacctattcaggttagtataggttggacgctcaatatcgaggtttctacgacagatgtcatagatggcctcattgtctaccatgaaggcacaatcagagtgctccagggtggtgtgggtggtgaggatggagttgtagggctcaactacag

SEQ ID NO: 1428 - DNA, 517 bp, Homo sapiens
ctgcagcctgggactgaccgggaggctctgattatttacccaccacaggtaggttgtgttctgaatctcaggttcacaggttaaggctacagcatcctcatcctccacggggttggagttgttgctggtgatgaagggtttgggtggctcatagactgtgatcgtcgtgactgtggtcctattgaggccagtgtctgagttatgggcttggcacgtataggatccactattattcacagtgatgttggggataaagagctcttgggtggattgctggaaagtcccattgacaaaccaagagtactgtgcaggtgggttagaggctgcgtggcaggagaggttcagattttcccctgatctgtaagatgtgtttagaggggaaatggtgggggcatccgggccatagaggacattcaggatgactgaatcactgcgcctggcactcactgggttctgggtttcacatttgtagcttgctgtgtcatttcttgtgacattgaatagagtgagggtcctg

SEQ ID NO: 1429 - DNA, 240 bp, Homo sapiens; identical to SEQ ID NO: 1249

SEQ ID NO: 1430 - DNA, 65 bp, Homo sapiens
ctggatgagccaaaactagaacgacggcctcgggagagacacccaagctggcgaagtgaagaact

SEQ ID NO: 1431 - DNA, 83 bp, Homo sapiens
gtgctgagagtgcggagtgtgtgctccgggctcggaacacacatttattattaaaaaatccaaaaaaatctaaaaaatctttt

SEQ ID NO: 1432 - DNA, 371 bp, Homo sapiens
ccagcaacatgtccctgatctcagtgaggtcctccttggtgaacacaaagcccacattcccccggatatgaggcagcagtttctccagagctgggttgttttccaggtgccctcggatggccttgcgcatcatggtgttcttgcccatcagcaccacagccttcccgcgaagggacatgcggatctgctgcatctgcttggagcccacattgtctgctcccacaatgaaacatttcggataatcatccaatagttggatgatcttaaggaagtagttggacttccaggtcgccctgtcttccctgggcatcacggcggtgcgtcagggattgccacgcagggtttaaagacgatgtcacttccacgaggac

SEQ ID NO: 1433 - DNA, 315 bp, Homo sapiens
ctctcagctctcggcgcacggcccagcttccttcaaaatgtctactgttcacgaaatcctgtgcaagctcagcttggagggtgatcactctacacccccaagtgcatatgggtctgtcaaagcctatactaactttgatgctgagcgggatgctttgaacattgaaacagccatcaagaccaaaggtgtggatgaggtcaccattgtcaacattttgaccaaccgcagcaatgcacagagacaggatattgccttcgcctaccagagaaggaccaaaaaggaacttgcatcagcactgaagtcagccttatctgg

SEQ ID NO: 1434 - DNA, 466 bp, Homo sapiens
  misc_feature 359, 360: n = A,T,C or G
aaaataaaggataaattctaagtaagtcattaagctaaggaaaaagcagtgatactagtaagccttaatattatactaaggaattgacccacttggagttggacactaattagtgctgagaggtttgtaaattactttaataactcctttctgtttgggggtgtatgctttttccatacctatctttcacatgtttttaacaacatcttctaagtggtaataatgagcatatctcttaccacagagcaaattagttatacttaaggggaagtcacaaccaacacggtagtcatctgactttctattaagaaagatcttctgactgcaacttgaaaacatctctgacaatgattgagaanngcattttagagattcaatgccttgtttcttcaggcaaagagaataccagtcttgtgggagacctttaaccaaatacccagtgacttttagtgttagctcaggacag

SEQ ID NO: 1435 - DNA, 328 bp, Homo sapiens
cccacggactcctggtctgagcccaataaagactgttaattcctcatgcgttgcctgcccttcctccattgttgccctggaatgtacgggacccaggggcagcagcagtccaggtgccacaggcagccctgggacataggaagctgggggcaaggaaagggtcttagtcactgcctcccgaagttgcttgaaagcactcggagaattgtgcaggtgtcatttatctatgaccaataggaagagcaaccagttactatgagtgaaagggagccagaagactgattggagggccctatcttgtgagtggggcatctgttggactttccac

SEQ ID NO: 1436 - DNA, 181 bp, Homo sapiens
  misc_feature 30, 66, 94: n = A,T,C or G
ttttttttttttttttttttttttttttgnaaagcgctgatcctgtttatttggcaggaaaacganacaatccagcagcccaggagggacaggnggacttaatcctcctcctcgtcgtctccagccccagccccaccctggcccttcttggcattcttcctcttcacgcggcccgggcggc

SEQ ID NO: 1437 - DNA, 454 bp, Homo sapiens
  misc_feature 430: n = A,T,C or G
ctggcttcactgctcaggtgattatcctgaaccatccaggccaaataagcgccggctatgcccctgtattggattgccacacggctcacattgcatgcaagtttgctgagctgaaggaaaagattgatcgccgttctggtaaaaagctggaagatggccctaaattcttgaagtctggtgatactgccattgttgatatggttcctggcaagcccatgtgtgttgagagcttctcagactatccacctttgggtcgctttgctgttcgtgatatgagacagacagttgcggtgggtgtcatcaaagcagtggacaagaaggctgctggagctggcaaggtcaccaagtctgcccagaaaactcagaaggctaaatgaatattatccctaatacctgccaccccactcttaatcagtggtggaagaacggnctcagaactgtttgtttcaattgg

SEQ ID NO: 1438 - DNA, 429 bp, Homo sapiens
  misc_feature 386, 388, 418: n = A,T,C or G
aaagaatcagcaaaatttcaaataaaaaattatgaaaatattatcctcattagttcatttagtcccatgaaattaattattttctctgcttgatcttggtggacagtttcatgaagctgtcagttagttcattaaagttttggaaattctcagacagtgcagtggtatcagaaacttgtattcaagagtacaggtcagagtcttcttttcttttctttttgagatggagtcttgctctgttgccagactggagtgcagtggtgcgatctgggctcactgcaatctccacctcccgggttcaagcgattctcctgcctcagcctcccgagtaactgggactacaggtgcgcgccaccaagcccagctcatttttgtatttttagtananatggggtttcacgatgttggctaggatggnctcgatctctg

SEQ ID NO: 1439 - DNA, 447 bp, Homo sapiens
  misc_feature 406, 422, 436: n = A,T,C or G
attccgtcctgcgcggttgttctctggagcagcgttcttttatctccgtccgccttctctcctacctaagtgcgtgccgccacccgatggaagattcgatggacatggacatgagccccctgaggccccagaactatcttttcggttgtgaactaaaggccgacaaagattatcactttaaggtggataatgatgaaaatgagcaccagttatctttaagaacggtcagtttaggggctggtgcaaaggatgagttgcacattgttgaagcagaggcaatgaattacgaaggcagtccaattaaagtaacactggcaactttgaaaatgtctgtacagccaacggtttcccttgggggctttgaaataacaccaccagtggtcttaagggttgaagtgtggttcanggccagtgcatattantggacagcacttantagctgtggag

SEQ ID NO: 1440 - DNA, 420 bp, Homo sapiens
aaatgcattttatttttagacaacctacatgacatgtttttcttaaaaacaatgcctccactccaaataaatcacagtcaaaataaatgaagagctcaagatgacatcagtcccatttgtcttaagtcctggtgttgtgtggatgacaagcagaagccagttatgatgacaggtgatagatccaaaataattgccacatttgttaacatttttccatttctaaaccatccttaaagaaaatcatatatggggtcacaccatcctcacggtagtccaatagagcaaccatgccatctggattcatgttttcaccaataaagaactggtagtttttgaaattagcaaggatgtgcttgatttgttctgcagcccctgtcataaaaggttttactctttctggtctctgttcttcaagtttcc

SEQ ID NO: 1441 - DNA, 286 bp, Homo sapiens
cctcaatcacaactttgtcagcagcagaaccggagggagccgcaatgtacgccacaccactccttttagctctgtctacgttatctcggaaagggaagaaggcatcagagctgatagaaacttcagtcagtttctcaacccattccttcttctctgcctcagtgagtaactcagggacttcctcaaacagtgccttccactttatcaaatcttcatcctcgccaatggttccagtcacatattgatcgatggcattggagatttctgctctcttcactcctgtttt

SEQ ID NO: 1442 - DNA, 103 bp, Homo sapiens
ctggcattttggcagatgcatagagacatctgagaccctcagaaaggaaggataatccaagaatataggaaatctgtgttctcttcctttcattttatccctt

SEQ ID NO: 1443 - DNA, 539 bp, Homo sapiens
ctgcagagagaactcgatgccaccgcaacggtattggcgaaccggcaggatgaaagtgagcagtccagaaagcggcttatcgaacagagccgggagttcaagaagaacactccagaggatttgcgcaagcaggtagcgtcgctgctgaagagtttccaaggagagattgatgcactgagtaaaagaagcaaggaagctgaagcagctttcttgaatgtctacaaaagattgattgacgtcccagatcccgtaccagctttggatctcggacagcaactccagctcaaagtgcagcgcctgcacgatattgaaacagagaaccagaaacttagggaaactctggaagaatacaacaaggaatttgctgaagtgaaaaatcaagaggttacgataaaagcacttaaagagaaaatccgagaatatgaacaggcactgaagaaccaagccgaaaccatagctcttgagaaggaacagaagttacagaatgactttgcagaaaaggagagaaagctgcaggagacacagatgtccaccacctc

SEQ ID NO: 1444 - DNA, 484 bp, Homo sapiens
  misc_feature 479: n = A,T,C or G
ctgctttgttttctgttggcagtggagggacaaggtgagaggagccaggggtagtcatgaacaccagtgggttctgccctgggcagctccccaccttctttaagagagtactgtgtctcagctccagcagtctcaactgggaagacccaggactcctgctcttttctctagtccctgggagacgaggtccagctaaggtagagtaagcagtcagtgaccaggcaggctggtttgggaggtcactgcctggagggcgggatcttgtattcttcggaagatggctgggaaattcttccctccattacgtagaactttcttcccctcctcagttgaggtgcctagatgtcccacaacggggtcttcactcaggtcctccaaaggcacacgctcaaacagtgggtgctcttcgaaatgagtgcacatccagtcgtgtagctccagcacatcggttatggtatacaccagcccccaactcttancacgt

SEQ ID NO: 1445 - DNA, 390 bp, Homo sapiens
  misc_feature 275, 326, 369: n = A,T,C or G
aaaagaatactagcagcttttacctaggctcctaaatgcttgtaaatctgagactgactggacccacccagacccagggcaaagatacatgttaccatatcatctttataaagaattttttttttgtcgtcagtttggcctttcctactgcagccaggtgagagcttaagatgtcagtccccaatatcttcacagagtgcctttatgaccagtttggagaattacgatggtaaggggaagaggcagatatgaagaggaatggttaggggaattgncattcataactctgtgctatattacttgaggggctaagaaaaatgtatggncagtgaaacacagtagtgtacccttaaatgccttataaaagancatccatccagtctgcgcttt

SEQ ID NO: 1446 - DNA, 432 bp, Homo sapiens
cctgagcgaagcccacaaccccgccgggcacatgtgaaagtaaacaaaacctgaaagcaagcaacaaaacatacactttgtcagagaagaaaaaaatgccttaactataaaaagcggagaaatggaaacatatcactcaagggggatgctgtggaaacctggcttattcttctaaagccaccagcaaattgtgcctaagcgaaatattttttttaaggaaaataaaaacattagttacaagattttttttttcttaatgtagatgaaaattagcaaggatgctgcctttggtctctggtttttttaagcttttttgcatatgttttgtaagcaacaaatttttttgtataaaagtcccgtgtctctcgctatttctgctgctgttcctagactgagcattgcatttcttgatcaaccagatgattaaacgtt

SEQ ID NO: 1447 - DNA, 416 bp, Homo sapiens
ggccaaataagcgccggctatgcccctgtattggattgccacacggctcacattgcatgcaagtttgctgagctgaaggaaaagattgatcgccgttctggtaaaaagctggaagatggccctaaattcttgaagtctggtgatgctgccattgttgatatggttcctggcaagcccatgtgtgttgagagcttctcagactatccacctttgggtcgctttgctgttcgtgatatgagacagacagttgcggtgggtgtcatcaaagcagtggacaagaaggctgctggagctggcaaggtcaccaagtctgcccagaaagctcagaaggctaaatgaatattatccctaatacctgccaccccactcttaatcagtggtggaagaacggtctcagaactgtttgtttcaattgg

SEQ ID NO: 1448 - DNA, 429 bp, Homo sapiens
cctgtcagagtggcactggtagaagttccaggaaccctgaactgtaagggttcttcatcagtgccaacaggatgacatgaaatgatgtactcagaagtgtcctggaatggggcccatgagatggttgtctgagagagagcttcttgtcctacattcggcgggtatggtcttggcctatgccttatgggggtggccgttgtgggcggtgtggtccgcctaaaaccatgttcctcaaagatcatttgttgcccaacactgggttgctgaccagaagtgccaggaagctgaataccatttccagtgtcatacccagggtgggtgacgaaaggggtcttttgaactgtggaaggaacatccaagatctctggtccatgaagattggggtgtggaagggttaccagttggggaagctcgtctgtctttttcctt

SEQ ID NO: 1449 - DNA, 324 bp, Homo sapiens
ctgccaaaatctggggaaaataggatcaaagttaggggacagttgtagttctggtgagagacggtgaggtcccgagctcctgggatgagaaaacgaaactggaataggtagacacagtattccttcaagttgtgctttatgaaaaaaaaaaaaatgatgacaaaagaggccagttactttggtaggtctccttttgtgcagccaaacaggtctcatccagttatattttctgctgaagtcttgtttcttttattataattaaataaatgttgtttccaccacaactaagtcaggagcatcatgacatcagttttcccaggtttt

SEQ ID NO: 1450 - DNA, 70 bp, Homo sapiens
ccaccatgccagacctgtaccaccttctggtggagctgaatgctgtacagtcgcttctcgcttgctcggg

SEQ ID NO: 1451 - DNA, 391 bp, Homo sapiens
  misc_feature 310: n = A,T,C or G
ggccctacctccttccctgtccccacccctgcataaggcagttgttggttttcttccccaattcttttccaagtaggttttgtttaccctactccccaaatccctgagccagaagtggggtgcttatactcccaaaccttgagtgtccagccttcccctgttgtttttagtctcttgtgctgtgcctagtggcacctgggctggggaggacactgccccgtctaggtttttataaatgtcttactcaagttcaaacctccagcctgtgaatcaactgtgtctcttttttgacttggtaagcaagtattangctttggggtggggggaggtctgtaatgtgaaacaacttcttgtctttttttctcccactgttgtaaataacttttaatgg

SEQ ID NO: 1452 - DNA, 490 bp, Homo sapiens
aaagcggatctttcctctttgggccatgggtggatttcctgctcaagcaaccttcatctcttaagctgtgttgctggaatctggactttccattcaagctggggcccatcaatcactcggcggctcctctaatgtcttaatcatcctgaaatgcctctgccggccgcattacgtgcctaaatccaaatcatgcctcgactctttccagaaccctctgtcgccatgctagcgtccacagacctgctcccttgaacacctcctctgagattcactgtccacgcactgtgcttttcctggcttggtcggttcctgtgttcacgtacttcctggctttgcagcttggcactggagctgagtctgaaccccagccttaccctgaagtagttacgtagccttgggcaagttactcaacctcttcaagtctgtttcctcaactgtcagctccacatgacatcgaaacgcttcctgcagctcatctgggacggagtgg

SEQ ID NO: 1453 - DNA, 334 bp, Homo sapiens
cgggcgctgaccgtgcccgagctcacccagcagatgtttgatgccaagaacatgatggctgcctgcgacccccgccatggccgctacctgacggttgccgccgtgttcaggggccgcatgtccatgaaggaggtggatgagcaaatgcttaatgtccaaaacaaaaacagcagctattttgttgagtggatccccaacaatgtgaaaacggctgtctgtgacatcccacctcgggggctaaaaatgtccgccaccttcattggcaacagcacggccatccaggagctgttcaagcgcatctccgagcagttcacggccatgttccggcgcaagg

SEQ ID NO: 1454 - DNA, 429 bp, Homo sapiens
  misc_feature 419: n = A,T,C or G
aaaagacactcctcccaaggactaggaagcctctgaaatgggcttggaagtttctaatcccaaagacttcgaacccaggatctggatagcaagcaaaaatatttagatatttactcagttgaaaacgtggggggtggcttcgtggtctcttcgccagccaaatcgcgtggaaaaccacgacctcaatttttacaacagcacgaagacttacaagtgagcgtagcagcgacttcctggaacctcaaacaatgtgggacgctgcaataatgcctgagggcttttgacttacagttgccgccggagacctggggagggggtagtacttgggccggtgagtccaacctcaggaactgtcctttcaaaatggtgatggatgtaacaagttgcatgtctgggctttatttcagtgtattaattgngcgatctttt

SEQ ID NO: 1455 - DNA, 456 bp, Homo sapiens
  misc_feature 260: n = A,T,C or G
cctaaaagatcactatctttcattcagggaaatcagaaactacttctagcagggggagggaggcaggcagggaaagtagaaagggcctgggcagagctgtaatcctcagaacttgtcagccttcagttcccccttgtctgaactgagcactgcccctcagagtcctcccagagccaagacaaaaccaagacagcaggaccaggagtgccactgtctgtcggggttgcctgagggagaaggggaaggaggtggaggtgtangcagcatcactgcagaggcgagatcttcaaggggatcatgatcctagactccatgtgtcgcaccagggggactgtatagtagacattttcatcccagcctctcttcctccaggcagcgtttcgagtctcctcccgagactgcaggtctttataggcccagagatggtgcaccacgtagagctctcctatctgtgag

SEQ ID NO: 1456 - DNA, 466 bp, Homo sapiens
aaatagctgagcacctactggaagaattcctgggctaaatgctgaaaataaaatttaatttctgcacagaaaataccattaacttagtagcctttgcttaaaggtgggattaattctccatgaagtcagaatgagacaataagcagcattaacttcataggcacacagaactagtgctcaaactgctagcacaaattccaacagagtacataaggctaagtcactactcaagtgtccatttccatcaaatttagagactctccctatgcatctaagggaaggaattatcactgaatataaatgcctccaggagaaacggagaattcagttaaggttaaattagacaaaagataataagtgcaagtactagagaaatgttgctggagataaaccataaaatttgtgacactaacgtggcatggggtgaatcacataagctgctagctgttgaacaccagtgtttcaa

SEQ ID NO: 1457 - DNA, 363 bp, Homo sapiens
  misc_feature 292, 303, 308: n = A,T,C or G
ccaggaggcgagaaggtggctgttcccggattgactgctttttcccgggggcctttggaagatttggtggaaggacaagagggcctgtccctgtccccgtccccaggaggtgccgacagtccctgtgctggttagacacggagcgctgcacaccgaaagcccaaattgggagctctgcctgccggcaactttgctgatggggtgattgctgcttctggggggtaaggaaacaagttacagaaattaccgcgttctgtgtgaagggactgaaggtgtggtgtcattggcaganggtcattttangaganctgccccagcccctcgaacgcctggcttggggtgtcattctgcctggcgggcagg

SEQ ID NO: 1458 - DNA, 233 bp, Homo sapiens
aaatcactaaaaatatttattcggatttgaaggatttaagtgctaaaaatcaatccatttcttgcccttcaataattgtccatgcctgccttttgttgtttacatgctcttctgcccagactgttagtaatctagggaccccctttggagctgataagtacagttcagccttttctcctcaaatatataatgactttaacattcctaagaatataggtatttctgaatgattt

SEQ ID NO: 1459 - DNA, 456 bp, Homo sapiens
  misc_feature 435: n = A,T,C or G
tttttttattattgtacaccttgaaggcgaggttaattaaatcctgttgtggagtttgagggccggaatttaatttttggagttttatttaatatcgggagcagattgggtaataaaatgtatattgagaataagacggccttttgaccttttagggtctagggctgtaaagtgtctcagggttgctgccgaacgagccatgaactgggctgggtttttatatttgatgaaaaagagcctaaacgcttctgatttgggataaagaaaaaggagcattaaccttgactatgtctttagctccagccacctttttaagagtaaattgctgggcaggtgggggagggctagtcacagaacgaaactgtaagccagaccgggtgtgaggaggggaggtgataaaaagattatagggtggaggagcggaggctgaggaanaattgggacctagctcggcct

SEQ ID NO: 1460 - DNA, 533 bp, Homo sapiens
ccaaaatattttataacttgtccatacagagttttgatgatggagactattttcctgtgtggggcacatgccttggatttgaagagctttcactgctgattagtggagagtgcttattaattgccacagatactgttgacgtggcaatgccgctgaacttcactggaggtcaattgcacagcagaatgttccagaattttcctactgagttgttgctgtcattagcagtagaacctctgactgccaatttccataagtggagcctctccgtgaagaattttacaatgaatgaaaagttaaagaagtttttcaatgtcttaactacaaatacagatggcaagattgagtttatttcaacaatggaaggatataagtatccagtatatggtgtccagtggcatccagagaaagcaccttatgagtggaagaatttggatggcatttcccatgcacctaatgctgtgaaaaccgcattttatttagcagagttttttgttaatgaagctcggaaaaacaaccatcattttacctgc

SEQ ID NO: 1461 - DNA, 553 bp, Homo sapiens
aaaaacaaggaagaacctaggaaagtccgctttgattatgacttattcctgcatcttgaaggccatccaccagtgaatcacctccgctgtgaaaagctaactttcaacaaccccacagaggactttaggagaaagttgctgaaggcaggaggggaccctaataggagtattcataccagcagcagcagcagcagcagcagtagcagcagcagcagcagcagcagcagcagcagtagcagcagcagcagcagcagcagcagcagcagtagcagcagcagtagcagcagcagcagcagcagtagtaccagtttttcaaagcctcacaaattaatgaaggagcacaaggaaaaaccttctaaagactccagagaacataaaagtgccttcaaagaaccttccagggatcacaacaaatcttccaaagaatcctctaagaaacccaaagaaaataaaccactgaaagaagagaaaatagttcctaagatggccttcaaggaacctaaacccatgtcaaaagagccaaaaccagatagtaacttactcaccatcacca

SEQ ID NO: 1462 - DNA, 375 bp, Homo sapiens
ctgccaaggagaccctgttatgctgtggggactggctggggcatggcaggcggctctggcttcccacccttctgttctgagatgggggtggtgggcagtatctcatctttgggttccacaatgctcacgtggtcaggcaggggcttcttagggccaatcttaccagttgggtcccagggcagcatgatcttcaccttgatgcccagcacaccctgtctgagcaacacgtggcgcacagcagtgtcaacgtagtagttaacagggtctccgctgtggatcatcaggccatccacaaacttcatggatttagccctctgtcctcggagtttcccagacaccacaacctcgcagcctttggccccactctccatgatg

SEQ ID NO: 1463 - DNA, 472 bp, Homo sapiens
cctgacattcctgccttcttatattaataagacaaataaaacaaaatagtgttgaagtgttggggcagcgaaaatttttggggggtggtatggagagataatgggcgatgtttctcagggctgcttcaagcgggattaggggcggcgtgggagcctagagtgggagagattaagctgaagggaggtcttgtggtaaggggtgatatcatggggatgttagaagaaacatttgtcgtatagaatgattggtgatggcctggatacggttttggatgatttgagaagctaaatggaagatacaaggtccgaataaaaggaggagaaaaatgggtattaaatgtctaagaattgggaggacctaggacatctgattagagagtgcctaaggagattcagcatagtcctgccagcaaagattatttacttcaagagttaagagtggcagtttggggatagcaccaggagatatcag

SEQ ID NO: 1464 - DNA, 416 bp, Homo sapiens
  misc_feature 232: n = A,T,C or G
ccacttcctcaggactaagcagcaaaacctaaaggtctgcctgcccagaccacactacacatttgggctcaggcaacgtccctgacactttaacctcattccaaagtcagctcaggtctgcaggaaggcaggcaaaattccctacacctcatttctggatttctgcaccacacagctctcactgtttctgccaatggtgaaaagaccaccaataagctgctgcccttctctnccccaaccattcccaactttcaggccaaagagccgcaggagtttcattctgtcctgtctgtacagatcattattttccagaaaaagtgacccatgaagttggctggggcgggtgtggagtgttatgtcatgggacggaccttgggatgagggcgttaatccatgggcccctctgagatcacttt

SEQ ID NO: 1465 - DNA, 599 bp, Homo sapiens
  misc_feature 499, 548, 590: n = A,T,C or G
ccatggtcttcaccccatgaattctccactctccattttgtgaaagcaccatcctgatcatccttctctgagacagcagtgaaggtcatggcgtgggtcataagtgactcaccaaaagtcagcctctccgctttattcatgttcttcaaggagacaccaaacactaactcatggtcatagagattcatgtcactgaggcccagcttgctattgaagtgttttccaacatcacagccaaaccacacagcctctccatctttgatggaggcagcaaccatctttttcaggaagtcaatgggctggttgttgtatagagtttttctccctccaaccatattgcttaagtattccactgtgtaaagtttgttgtacttgtgctggggcctagggtcattcactaaacaaatcttatcttccatattgaagagtggcttgacatgttccctgtaaaactccaagggtgttatggggcccattttctgataatttttatctttgnctcgatattcccaggtgaatgtctctggtggattacccaaacagatgcncaccactcggaatatctcctccatcatgacgtcctgtgtggncgagaattc

SEQ ID NO: 1466 - DNA, 349 bp, Homo sapiens
cctaaaagcaaactccacagccaaacctttcctcctgtctgtcctacacaccaggaagaatcgaaaaagggaattttcctttacatagctcaagttaaagactttttcatgaaaaagtctagatcatctctctactgtgatttggtacatttctaacgtttatttttattttttaacttaatttttgtggatacatagtaggcgtacatatttctgtggtacatgagatgttttaatacaggtgtgaaacatgtaacaatcacgtcatctaaaatggggtacccatcccctcatgcactgatcttttgtgttatacaagcaatccaattatactcttttagttattttt

SEQ ID NO: 1467 - DNA, 355 bp, Homo sapiens
gctggctcagggaagtgtcttcttgcccacatttctgtggggaaaggtttttaatcctctgatgcttccatcttcctgtttaggccatgtgcccagaaacctggactgatctttctttaatagtgaacccctgggccactgaagagtaacatggctccactggacacaaaagagggatggaatcaacaggcagggggccttttataagccttaggaaaagaaaatgaaactatttcatctttggacttttcaatactattggagtgatttttttctttctaaacagggaaaataatgttacaaaagcatcttttttgttatttgtttgcatccctcccccacaccctggtgtttt

SEQ ID NO: 1468 - DNA, 261 bp, Homo sapiens
cctttactttattcagtgaaagtgtctatttagactaagaggtattttagtttcctgactcgggacatgttgagtaaaggtaatttgccagtcctgggtggggcaaatcctccagcctgatgtgtagggaagggagggggcctgaataatccctgaggagtagtagaatagcagatggaacactgagaagttatttccttgaggatagatttccacgatggaaaggaaatgagaggttctgagaggcgggctagtggcttg

SEQ ID NO: 1469 - DNA, 428 bp, Homo sapiens
cctacagacttatttcttcttggacacacccacggtgcggccacggcggccagtggtcttggtgtgctggcctcggacacgaaggccccagaagtgacgcagccctctatgggcccgaatcttcttcagtcgctccaggtcttcacggagcttgttgtccagaccattggctaggacctggctgtattttccatcctttacatccttctgtctgttcaagaaccagtctgggatcttgtactggcgtagattctgcataatggtgatcacacgttccacctcatcctcagtgagttctcccgccctcttggtgaggtcaatgtctgctttcctcaacaccacatgagcatatcttcggcccacacccttaatggcagtgatggcaaaggctattttccgccgcccatcgatgttggtgttgacctgcc

SEQ ID NO: 1470 - DNA, 325 bp, Homo sapiens
ctgccttatccacccggagcttgtgattcctggcctggcgaagaatggtgttccggcgcatggtctttgcatatgggtttagcttcaacatgattctcaagtttttcagtgggttcttctttaggactctgcgatggatcttcttgcgtggtgctcgaagggctctttggatctctgggcttttcaagattctgctaagatctgtattaatcatcttgtgcatgggaagattgtagttactcttgagggaagcggctttacgccaagtgccgtacaattcatctaacttccggaaagcactttcagtccaaatgcagaaacgtcc

SEQ ID NO: 1471 - DNA, 531 bp, Homo sapiens
  misc_feature 485: n = A,T,C or G
ctgggccaagtaggagagggaagaggtgatatgagcctcctctgtgctctgacagagaaatgtccaattccagatcaaaggcatcattgccaccctctcctctccttcctcaaagaaaactttctggcctggagggaaatagttaagaactgaaaggccaggggctctggaggaaaaaaaccctctactatttccacaaggcagtgaggggtgataagggtgctagtcacagccctgacagcttcagaaagggtacccacattacctctgggttacccagcatccagagccccaagggacctagctctcccggatatatattcctgcaatggactgacctttttacccacttgtctctggtggtgggagagcactctgaaccagaaaccaacaaggaatccacttcccacccaacttaagagtgtatgcacacatgtggatacacatgcacctccccactactcacacagaccccaacccccttnatgtcttttgaggggggctcaaactactggtgcctggggacacaag

SEQ ID NO: 1472 - DNA, 566 bp, Homo sapiens
ccaggttttagatattaacctggctgcagagccaaaagtgaaccgaggaaaagcaggtgtgaaacgatctgcagcggagatgtacggctcctcttttgacttggactatgactttcaacgggactattatgataggatgtacagttacccagcacgtgtacctcctcctcctcctattgctcgggctgtagtgccctcgaaacgtcagcgtgtatcaggaaacacttcacgaaggggcaaaagtggcttcaattctaagagtggacagcggggatcttccaagtctggaaagttgaaaggagatgaccttcaggccattaagaaggagctgacccagataaaacaaaaagtggattctctcctggaaaacctggaaaaaattgaaaaggaacagagcaaacaagcagtagagatgaagaatgataagtcagaagaggagcagagcagcagctccgtgaagaaagatgagactaatgtgaagatggagtctgaggggggtgcagatgactctgctgaggagggggacctactggatgatgatgataatgaagatcggggggatgacc

SEQ ID NO: 1473 - DNA, 357 bp, Homo sapiens
ctgggaacaactttcttcaaactacctggtggtgaacttaacccaggagaagatgaagttgaaggactaaaacgcttaatgacagagatactgggtcgtcaggatggagttttgcaagactgggtcattgacgattgcattggtaactggtggagaccaaattttgaacctcctcagtatccatatattcctgcacatattacaaagcctaaggaacataagaagttgtttctggttcagcttcaagaaaaagccttgtttgcagtccctaaaaattacaagctggtagctgcaccattgtttgaattgtatgacaatgcaccaggatatggacccatcatttctagtctccctcag

SEQ ID NO: 1474 - DNA, 374 bp, Homo sapiens
ccacaaatggcgtggtccatgtcatcaccaatgttctgcagcctccagccaacagacctcaggaaagaggggatgaacttgcagactctgcgcttgagatcttcaaacaagcatcagcgttttccagggcttcccagaggtctgtgcgactagcccctgtctatcaaaagttattagagaggatgaagcattagcttgaagcactacagaaggaatgcaccacggcagctctccgccaatttctctcagatttccacagagactgtttgaatgttttcaaaaccaagtatcacactttaatgtacatgggccgcaccataatgagatgtgagccttgtgcatgtgggggaggagggagaaaagatgtacttttt

SEQ ID NO: 1475 - DNA, 261 bp, Homo sapiens
aaatattgtgaaaacattacagcggaatgaattttcgcagtggttaggtcaaatgcagttacatcatagcaacagtatgttttgcacaatttaaggctttggctggttctttagtcagcttcttcctctgattcttcttcttcagcagtttctaaccaggttagccactgattcacctggaacaaagccttgccttttcccggaaactcttgggttatatcttctttccaagccaagaaagcttcttcttcaataatttcc

SEQ ID NO: 1476 - DNA, 390 bp, Homo sapiens
  misc_feature 280, 328: n = A,T,C or G
ccaccaatggtactgaacctacgagtacaccgactacggcggactaatcttcaactcctacatacttcccccattattcctagaaccaggcgacctgcgactccttgacgttgacaatcgagtagtactcccgattgaagcccccattcgtataataattacatcacaagacgtcttgcactcatgagctgtccccacattaggcttaaaaacagatgcaattcccggacgtctaaaccaaaccactttcaccgctacacgaccgggggtatactacggncaatgctctgaaatctgtggagcaaaccacagtttcatgcccatcgtnctagaattaattcccctaaaaatcaaaaaaaaaaaaaaaaaaaaaaaaaaagctaccttggc

SEQ ID NO: 1477 - DNA, 385 bp, Homo sapiens
aaaaaaccaatagcagccaaaacagaacatttgtaaacaaaaccacaactatcagccctgtgcttaaacacagaatctgcattcttttgaaacattaagtatatgcaataaagagaatatagaccatctttttccttaatatacaatacccaatatctaaaacaatgtcaccaataatagacacaaatcggtgttatcataaggcatgttgaacagtctttttcacagtactcaggggcatcatgttgctgcagaggccacactttccagaagttttctcctcgctgcgatcctcgcacaccgggggcactcggaggactggaagcactgtttgtgaaagcaagccctgcacgctgaacatcttctacatgttgctgtctgaaat

SEQ ID NO: 1478 - DNA, 491 bp, Homo sapiens
  misc_feature 350: n = A,T,C or G
aaaaattaattaaagagaaagagaaaagcaacattttaatgccccaggaattgaaactaacgttttctgtctcggctggacccctacgcccatcttttaaacctatatatggaaaaggaaatttcaatgccagatttgataaaagaatgtgatgtatatgtagctgatgacccactggggaacaccagtgttccagttcacttaccacatctgtgacagtgtgtttagattggaataaatgtgatgcattacttcttatgtttttatcagtgacatggttgactgtgccctaattctcttgagttgcagttaagcaatgaaggttatttcctaatagggaagcaaaaggngattgtcaattgatagtttaatgtttgaccacattagtgtctttatatgaaatagtagaggggaagaaattatagaaaacaaatgtgaaaaaaatacaccagtgggtatctgttctactaaaaccagaagattgttatgag

SEQ ID NO: 1479 - DNA, 454 bp, Homo sapiens
ccaattgaaacaaacagttctgagaccgttcttccaccactgattaagagtggggtggcaggtattagggataatattcatttagccttctgagctttctgggcagacttggtgaccttgccagctccagcagccttcttgtccactgctttgatgacacccaccgcaactgtctgtctcatatcacgaacagcaaagcgacccaaaggtggatagtctgagaagctctcagcacacatgggcttgccaggaaccatatcaacaatggcagcatcaccagacttcaagaatttagggccatcttccagctttttaccagaacggcgatcaatcttttccttcagctcagcaaacttgcatgcaatgtgagccgtgtggcaatccaatacaggggcatagccggcgcttatttggcctggatggttcaggataatcacctgagcagtgaagccag

SEQ ID NO: 1480 - DNA, 283 bp, Homo sapiens
ggcgctggggaagctgaagcagttcgatgcctaccccaagactttggaggacttccgggtcaagacctgcgggggcgccaccgtgaccattgtcagtggccttctcatgctgctactgttcctgtccgagctgcagtattacctcaccacggaggtgcatcctgagctctacgtggacaagtcgcggggagataaactgaagatcaacatcgatgtactttttccgcacatgccttgtgcctatctgagtattgatgccatggatgtggccggagaacagcag

SEQ ID NO: 1481 - DNA, 530 bp, Homo sapiens
aaatttgatgtgaaggaagtatcttaggagaagctaaaaaatacataaatgaacgaagactggaagaatcttcaagatgttaaaaactcatataaccacagaaataaaaactccaattgttaaagtcatagtaaagagaaggaagcaaatcataataggtcaaaatataaagataaaatgaccactgaaaggataataaagattgtgaaaatcaggacactctcaaacagaaaccaaaagcggaagagagatgaaagcaagagcaaagtaagacacaatttgtacgatcaacagaactggcactagggtcaagagcagcttcactttgcagaattcatcaatttgaagaacttctgtgatcttttgtgatggcctgttacaatgaacagtagtttcatttatatctgttccactaaaaaccactgctttttccaatatcgtgatcacagtaatgtttacaaagaatcaaacagaacataagaaggactaaagatacttctgaaacagatattaaaaaataataatgatgg

SEQ ID NO: 1482 - DNA, 420 bp, Homo sapiens
  misc_feature 393, 402: n = A,T,C or G
ctgccaaggagaccctgttatgctgtggggactggctggggcatggcaggcggctctggcttcccacccttctgttctgagatgggggtggtgggcagtatctcatctttgggttccacaatgctcacgtggtcaggcaggggcttcttagggccaatcttaccagttgggtcccagggcagcatgatcttcaccttgatgcccagcacaccctgtctgagcaacacgtggcgcacagcagtgtcaacgtagtagttaacagggtctccgctgtggatcatcaggtcatccacaaacttcatggatttagccctctgtcctcggagtttcccagacaccacaacctcgcagcctttggccccactctccatgatgaaccgcagcacaccatancaggccctncgcacagcaagccctcct

SEQ ID NO: 1483 - DNA, 233 bp, Homo sapiens
ccatggaaggcgaatttgggtttgaaattcctgatatagatgctgaaaagttaatgtgtccacaagaaattgtagattacattgcagataagaaggatgtatatgaataaagtatcagaccctttggctttgctgagagaggactcagatgatagtgacgaatgtctggcggtgaggacacattttggcattcttgctgactctgacagagtgattctgatggacttgtattt

SEQ ID NO: 1484 - DNA, 396 bp, Homo sapiens
cgcggtgcgacgaaggagtaggtggtgggatctcaccgtgggtccgattagccttttctctgccttgcttgcttgagcttcagcggaattcgaaatggctggcggtaaggccggaaaggactccggaaaggccaagacaaaggcggtttcccgctcgcagagagccggcttgcagttcccagtgggccgtattcatcgacacctaaaatctaggacgaccagtcatggacgtgtgggcgcgactgccgctgtgtacagcgcagccatcctggagtacctcaccgcagaggtacttgaactggcaggaaatgcatcaaaagacttaaaggtaaagcgtattacccctcgtcacttgcaacttgctattcgtggagatgaagaattggattctctcat

SEQ ID NO: 1485 - DNA, 546 bp, Homo sapiens
  misc_feature 461: n = A,T,C or G
aaaagtacttattttgtcacagcagccaagacactaacaaccacctaaatgtccaggacagttgaatggataaaataaatgtggtaatatacatacaaccaaatattatgtatccttaaaaaaaatcctgtcatatactacaacatggatgaatcttgaggacattacactaagtgaaataagccagtcacagaaggacaaatattgcatgaatccactaatatcaggtgtctaaaacagtaaaactcatcaaatcagaaagtaaaatggtggttaccaggggtcagagggagacgaaaattgggaggtgctgttcaatgggtataattttagtcatgcaagatgaaaagttctagagatctgctatataacaatgtacagacagttaacaatactatattgtacccttaaacatttgtggaagaaggtaggtctcacgttaagtgttttttaccacaatnaaaaaatatacagtcatggatacataaagagaaatgagctgttgggcaattttgttgttatacaaacatgatagtgtacttacac

SEQ ID NO: 1486 - DNA, 178 bp, Homo sapiens
aaaatccagaacttggactccatcgttaaaattatttatgtgtaacattcaaatgtgtgcattaaatatgcttccacagtaaaatctgaaaaactgatttgtgattgaaagctgcctttctatttacttgagtcttgtacatacatacttttttatgagctatgaaataaaacatttt

SEQ ID NO: 1487 - DNA, 498 bp, Homo sapiens
  misc_feature 210, 333, 486: n = A,T,C or G
ccaacatggtaaaatcctgtctctactaaaaatacaaaaaaattagccggatgtggtggcgtgtgcctgtagtcccagctactcgggaggctgaggcaggagaattgcttgaacccgggaggcagaggttgcagtgagccgagatcacgccactgcactccagcctggtgacagagcaagactccatctcaaaaaaaaaaaaaaaaaaangaaaagaaaaaattaattgtaagagattctatgcgtaaacatattggctaaagttaaaatggcattactgagttttttccataaattggacattggaataaaatcacaacagagttttcttanaacattgttctgctctgagaaaaactctgtaaagggttacaaaatgtttataaaaatcttaccttatggtcaaactaattaaaacaatagatttataaaatattaaaagctagctttaacattaaaaatatgcaaatggaaacataaaatttngttttctctttt

SEQ ID NO: 1488 - DNA, 355 bp, Homo sapiens
  misc_feature 266: n = A,T,C or G
aaaataaaaggagggctaatgtttcatgttgctttatacatccttctcctcaatacagaaccaggaatgtaattttcctaactcaggcaggcactgatactgatggacactgcgcgtgcacacacacacacacacatacacacacacacacacacacacacaccccctccccccaaacaacaaaattcagagtatgtcaaaggaaaaaggtttgttattgtattgatcaaaacccagtggaatcaacaccatctatcttagcttancaggtatgctgttttgatcttgagtctatattaatggaatctattgttgcattctgaaataaagaattttggatataccattatgtttt

SEQ ID NO: 1489 - DNA, 234 bp, Homo sapiens
ccagcgacctcccggttcaattcttcagtccggctggtgaaccaggcttcagcatccttccggttctgctcggccatgacctcatattggcttcgcatgtcactcaggatcttggcgagatcggtgcccggagcggaatccacctccacactgacctggcctcccacttggcccctcagcgtactgatttcctcctcatggttcttcttcaggtaggccagctcttccttcagg

SEQ ID NO: 1490 - DNA, 423 bp, Homo sapiens
ccatgtgtgcgcccagtgaaaagtttctgaacatgggtgcacccctgggagtgggcctgggtctcgtctttgtgtcctcattgggatctatgtttcttccacctaccaccgtggctggtgccactctttactcagtggcaatgtacggtggattagttcttttcagcatgttccttctgtatgatacccagaaagtaatcaagcgtgcagaagtatcaccaatgtatggagttcaaaaatatgatcccattaactcgatgctgagtatctacatggatacattaaatatatttatgcgagttgcaactatgctggcaactggaggcaacagaaagaaatgaagtgactcagcttctggcttctctgctacatcaaatatcttgtttaatggggcagatatgcattaaatagtttgtacaagca

SEQ ID NO: 1491 - DNA, 471 bp, Homo sapiens
  misc_feature 430, 443: n = A,T,C or G
ttcacttgtgtgcggaactcctcggaaccatggcgtccctttcccttgcacctgttaacatctttaaggcaggagctgatgaagagagagcagagacagctcgtctgacttcttttattggtgccatcgccattggagacttggtaaagagcaccttgggacccaaaggcatggacaaaattcttctaagcagtggacgagatgcctctcttatggtaaccaatgatggtgccactattctaaaaaacattggtgttgacaatccagcagctaaagttttagttgatatgtcaagggttcaagatgatgaagttggtgatggcactacctctgttaccgttttagcagcagaattattaagggaagcagaatctttaattgcaaaaagattcatccacagaccatcatagcgggttggagagaagccacnaaggctgcaaganaggcgctgttgagttctgcagttgatca

SEQ ID NO: 1492 - DNA, 227 bp, Homo sapiens
ctggtcaggaactctgggaggaaggcggcaaagaagccatcaaagtcgactgaggccatgttgtagatggcgatgccaatctcctcctgcagaagatcatgggacttgtggaccaggacctggagcagcacgttcacaaactggaacagcatggcagtccggaagatcttcttgtggtacagcttctgcttggtgttgagagtctccaagtagaagagattttgttt

SEQ ID NO: 1493 - DNA, 475 bp, Homo sapiens
ctgccaaggagaccctgttatgctgtggggactggctggggcatggcaggcggctctggcttcccacccttctgttctgagatgggggtggtgggcagtatctcatctttgggttccacaatgctcacgtggtcaggcaggggcttcttagggccaatcttaccagttgggtcccagggcagcatgatcttcaccttgatgcccagcacaccctgtctgagcaacacgtggcgcacagcagtgtcgacgtagtagttaacagggtctccgctgtggatcatcaggccatccacaaacttcatggatttagccctctgtcctcggagtttcccagacaccacaacctcgcagcctttggccccactctccatgatgaaccgcagcacaccatagcaggccctccgcacagtaagccctcctaggagtttgtaacgcagagactctgcctgggcaatggcacacagacctctagtgg

SEQ ID NO: 1494 - DNA, 480 bp, Homo sapiens
  misc_feature 400: n = A,T,C or G
aaacagagaatatatattttaatacatcgtttaagtttatgattaattatctattactgaggataagaatctttgcctgtgctcattcagcatttgcacttcatttatgatctgccttctcatagcttctgttaatttttatactagagacatttatttgtttgtataaatgttgaaggtttttttttgttgttgttgtttttgagtcagagcctcgctctgtcacccaggctggagtgcagtggcatgatctcggctcactgcagcctccatctcctgggttaaagtgattctcctgcctcagcctccagagtagctgggactacaggcatgtgccaccaagcaaggctaatattttgtatttttagtagagatggggtttcgtcctgttagccagggnggtctcgatctcctgacctcatgatctacctgcctcggcctcccaaagtgctaggattacaggtgtgagccaccgtgccc

SEQ ID NO: 1495 - DNA, 497 bp, Homo sapiens
  misc_feature 304: n = A,T,C or G
cctttagttattttgtctcttgttgctggagcccatccactgtctgacatcatagccatgggcaagaggatattgccttggctctgtctgagtgctggattgtgaccggccataagtagcctttgcaaaggaagctaatggacagtgcctgaattaagggtgcttaccctatcctagaaagcgttaaagtcaaagcggaaaatatacatggtacccaaaatcaaggagactgccagagaccagcaggggatctaagggatttaccactgggttagcacagacactacacttgaagatttcctancggctgctgctgctgtttccatgataagaattcagtgagacaaagaacctgccaagctcattaaccgagtagcaggaagagctactgtgtagcctctggtgttccccaactgactcagccctgcagatgggacatcctgtaggtcatgtgaatatcaagttactgagggatgttctcaggacaagcctagcat

SEQ ID NO: 1496 - DNA, 423 bp, Homo sapiens
gcttccattctggtggcaaccggggtcgtggtcggggaggaaaaagaggaaaccagtcggggaagaatgtgatggtggagccgcatcggcatgagggtgtcttcatttgtcgaggaaaggaagatgcactggtcaccaagaacctggtccctggggaatcagtttatggagagaagagagtctcgatttcggaaggagatgacaaaattgagtaccgagcctggaaccccttccgctccaagctagcagcagcaatcctgggtggtgtggaccagatccacatcaaaccgggggctaaggttctctacctcggggctgcctcgggcaccacggtctcccatgtctctgacatcgttggtccggatggtctagtctatgcagtcgagttctcccaccgctctggccgtgacctcattaacttgg

SEQ ID NO: 1497 - DNA, 409 bp, Homo sapiens; identical to SEQ ID NO: 840

SEQ ID NO: 1498 - DNA, 345 bp, Homo sapiens
cctccgtccagcatcagctcaaaggcgaaggacacattgtggaccttctgatcgaagctttccggagtcaggtagaagtggtggagaggaacaaagtagtcttccagaaggcccatgagcagaaccaggtacacgccatctgcaaactgggtctccagttccgtcacctccaaattcagcttgttcaggtgcttgttcacaaaagtgatgagagacttcttcaccacgctgagcttatccggggcgtggtcgaacagcgtgtcgaaggcatcccgctcgaaccggcccatcatcatctctatagttgtggtcagctcctccgagatgtggctggaatgcagcagg

SEQ ID NO: 1499 - DNA, 387 bp, Homo sapiens
  misc_feature 26, 225, 301, 371, 373: n = A,T,C or G
ttttttttttttttttgttgtcccanatttattgaaaataatacagcactacagaaaaaattcaaacaggtccccgaggcgttttgaaattcatcccaactgtaggctgagtgacctgaaggttggacagactgccgaagtccaaaagcttcagcatttccttagtgtcaggatctacttcaataatctcctgatccaaggctgagacctcaggaacataattgnctctcctttctctctcctcctcctgcagcttgatggagatacctcttactgggcctctctgaattcgcttcatcanatgcgtgacgtaacctgctatcttgttgcggagctttttgctggggataatggcgatctcctcgcacacncncttgttcgtgtgga

SEQ ID NO: 1500 - DNA, 243 bp, Homo sapiens
aaaatccttcagaatacatttatgaaccaatgcgactggacttagccacacacaatggaaattcagaccttgactatttggtgtttccagttcacaaaggtgatgaagactgtcttgggagcagcttaatcccaaaatttgtacatttcttgctgctcctggcgtggaaacttaagtgagaccaccaaatacattggtcctgtccaattctactgaatgggggtggacctggcatttatctgg

SEQ ID NO: 1501 - DNA, 537 bp, Homo sapiens
  misc_feature 492: n = A,T,C or G
ccacatcaaaagaatcactgataatgacatccagtccctggtgctagagattgaagggacaaatgtaagcaccacatatatcacatgccctgcagaccccaagaagacgctgggaattaaacttcctttccttgtcatgattatcaaaaacctgaagaagtattttaccttcgaagtgcaggtactagatgacaagaatgtgcgtcgtcgctttcgggcaagtaactaccagagcaccacccgggtcaaacccttcatctgcaccatgcccatgcggctggatgacggctggaaccagattcagttcaacttgccagacttcacacggcgagcatacggcaccaattacatcgagaccctcagagtgcagatccatgcaaattgtcgcatccgacgggtttacttctcagacagactctactcagaagatgagctgccggcagagttcaaactgtatctcccagttcagaacaaggcaaagcaataactggnattgtgactcgagggatagaccccctggatgtgactcttcttttt

SEQ ID NO: 1502 - DNA, 176 bp, Homo sapiens
ctgtccaatggcaacaggaccctcactctattcaatgtcacaagaaatgacgcaagagcctatgtatgtggaatccagaactcagtgagtgcaaaccgcagtgacccagtcaccctggatgtcctctatgggccggacacccccatcatttcccccccagactcgtcttacctttc

SEQ ID NO: 1503 - DNA, 455 bp, Homo sapiens
ctgtcaaagccatcatatatcagtatatggaagaggtgggtttttatttaactacttggataatttgtagctacttttatgatgtagtaatgtcactgtttaaccaggtttggatattagatgatcctaacaattcactatcctgtggcctaaagagacaggaattgatatcctttataaggaaaaaagtctattcacaggagccgagcagattgctcactgctgtgtagtaccctggtgagaggagataaatggagcaaggctgtaggttggagcccctcagtagaatcatagattttgagctgcaagatgatgcaggaggccaaccaagcttcttgttgctggtgaggaatgtgaggttgaagcttgtctgtgctgatgcagtgcgtgattgagtggatctctggctcccgtccatgtgtcctgacacccagtctggtactttcattatgcca

SEQ ID NO: 1504 - DNA, 266 bp, Homo sapiens
ccatggctaggtttatagatagttgggtggttggtgtaaatgagtgaggcaggagtccgaggaggttagttgtggcaataaaaatgattaaggatactagtataagagatcaggttcgtcctttagtgttgtgtatggttatcatttgttttgaggttagtttgattagtcattgttgggtggtgattagtcggttgttgatgagatatttggaggtggggatcaatagagggggaaatagaatgatcagtactgcggcgggtagg

SEQ ID NO: 1505 - DNA, 195 bp, Homo sapiens
ccagtttaccctgaaaattcccgtgagaagggagatggcggtagcagcgacgtgcccacctgtgatttctggggcccttcttttctctttgctggttcagggactcaagtccaggccaatttgactcaaagtccaagggagaagagaaagaggggggtggggagtgccaaattcctttattttgccaattgtttc

SEQ ID NO: 1506 - DNA, 470 bp, Homo sapiens
  misc_feature 383, 385, 409, 411, 421, 447, 458: n = A,T,C or G
aaaatattaacagtcaggcagggcgcggtggctcatgccgtaatctcagccactgaggaggctgcggcaggagaattgcttgaacccaggaggtggaggttgcagtgagccaaaattgcaccactgcactccagcctgggcgacagagcaagactctgtttcaaaaaaaaaaaaaagatttaagatggtaaattcgatgttatgttctttaccacaatatttttcttaaaggataactaaaaaaatcagagttataaagctatccaaaaattaccttcaaatcacaaaattgtttcacatagagaaaatacaaattcatcaacaaacacacagtaaaactaagattattttcctgactactcacctgacaagataaaaaaacntnaaagatcagcccagaaaaaatatntnagataagctntgaacaaagttggggtcatatttatngacaacatgcncattcatatgtg

SEQ ID NO: 1507 - DNA, 398 bp, Homo sapiens
ctgctggagtcggaactgctgcctttgtttggcggccttgtttcttaaatcagttccctcttaggatttattacactaaaaaaaaaattagtttttgaaaagaaataggagaatacagaaacatgaatttcacgaggctatcatctaacagtgggggctttctacacacgtggtgccaaaaatgtgtcattctgagtcaattgcaattcctctctaggagtgaaaagagataaaagataagccaagaaccctggacagattcttggtgttggtgacaaagaggaaaggacctgagaatggggctggtggggagagggggggtgtctgctggataccaggaggacaaggaccactcccacctgcaggggtgcccaggacctagttgggctcggcctcag

SEQ ID NO: 1508 - DNA, 483 bp, Homo sapiens
aaaaaggaaaaactaaaagggactgcctgctttttttactgtaaacacagccctggatattaaatcccaaacaggaatctctcaggcatcagagagtgtcaagtgagtcaggaataacacaaaataaaggaatgggggagaaaataaaaaaaaaacaaagcaaaattaaaataaatgtcagtcactttgaggaactatacttacgtatatgatgttatgagaatctggcagggcctagaagcaggccaaacaggaagttcatttatccaaccgaagaggatcatgttcattgcttccggttttgaggacaggatattgtagggaacttgatatgatcaataacgcttgtctgccttacacagaccttagccagggatcagcctaatcttgaagaatcattcaaataattttggcaattattataaggacttagaactgactgcacccagtgttcagtgattcttgccttctgttttgttactg

SEQ ID NO: 1509 - DNA, 200 bp, Homo sapiens
ccaattgaaacaaacagttctgagaccgttcttccaccactgattaagagtggggtggcaggtattagggataatattcatttagccttctgagctttctgggcagacttggtgaccttgccagctccagcagccttcttgtccactgctttgatgacacccaccgcaactgtctgtctcatatcacgaacagcaaagcg

SEQ ID NO: 1510 - DNA, 242 bp, Homo sapiens
ctgtggcctctgccaccccatgggtgccagtcttaagtttcagagcatcactggtactcaccctggtcctgcagctcctgggcccagagacaggatttcgtgttagcctcctcgtactgtgctggggtgatgataaaactaacaacccaggctggacgcagtggctcacacccgaaatcccaacattttgggaggccgaggtgggtggatcaactgaggtcaggagttcgagaccagcctgg

SEQ ID NO: 1511 - DNA, 501 bp, Homo sapiens
  misc_feature 455: n = A,T,C or G
gagatcatctgctccagaaccaaccaggagctgcaggaaattaacagagtctacaaggaaatgtacaagactgatctggagaaggacattatttcggacacatctggcgacttccgcaagctgatggttgccctggcaaagggtagaagagcagaggatggctctgtcattgattatgaactgattgaccaagatgctcgggatctctatgacgctggagtgaagaggaaaggaactgatgttcccaagtggatcagcatcatgaccgagcggagcgtgccccacctccagaaagtatttgataggtacaagagttacagcccttatgacatgttggaaagcatcaggaaagaggttaaaggagacccggaaaatgctttcctgaacctggttcagtgcattcagaacaagcccctgtattttgctgatcggctgtatgactccatgaagggcanggggacgcgagataaggtcctgatcagaatcatggtctcccgcagt

SEQ ID NO: 1512 - DNA, 556 bp, Homo sapiens
  misc_feature 525: n = A,T,C or G
aaatgacccaaaactattaataggtattttaagcaataattattaaaaacagaagtgctacatcacctgtctttcgccctgactctccaaatgaacataaagacacaccaaaaggctggtaacagagctagctgggacaatcactgcatctatagaacagccaataccttgaaaaactaggcacaagtacatgaggaattcttatcaaagatcatgcacaatccatgccacttaaatgggttttagctgaggttttgctcatgttactctgaatttctaaggacagatcagtgaccctcttagcctgagcagaaagcatattcttcccactgcagtttcctacacaatttagtcctgattagatgaggcattatagcagcacctgaagtagagcctccagaatccactgcccttttcatcaaaggctatttggttccaccctcaggattggcatactcacgagacatttcacaatcctaatgcatactttaggttacttaattaaccaagcaatatgctctgtcnaagaacttatttcaagtcaaagcaaaaaagg

SEQ ID NO: 1513 - DNA, 290 bp, Homo sapiens
ccagtgcagaaacgtttaatagaaataaaaaggtctgcatagagccgaggctcggagccacccctctgccgcacatccagtacagagaggattctataaagttcacactttttcattaagtagtagtagaaatacggtgaggccctgagactggcctggtgagcgaggaaaggccgctgggcgcttccactctgcaggccggggctgaaataacccgagttccgttctcacagaaaggtgcggctgccacctcttgacacagaggccggatgggcaggtgtcctcgatgg

SEQ ID NO: 1514 - DNA, 451 bp, Homo sapiens
ctgtggggagaggccgcctcctctgatggggtctcgatgctgctgctctgttcctggtctggcacgtcctcctcttcctgctccaagctgaagttctacctcgagctcctgaaaaatctcatccatgaagtcctgggagttctgtttgtaagacacagctaatcgaattgcatcattgaagagcttcacaacattggtaccatcagcagccgagacgaaatacaggggcagggagaacttcttggcaaaattgaagcttttttgggtcacgtttatgtctgcatcaattttattggccaggctggtcttgaactcctgacctagtaatccacctgcctcggcctcccaaagtgctgggattacaggcgtgagccactgcacccagccagaaatgccgtctaatctttggtttatcttaattagccaggacacttggagtgcatcccgaagt

SEQ ID NO: 1515 - DNA, 316 bp, Homo sapiens
  misc_feature 60, 103, 104, 129, 133, 260, 265, 266, 306, 313: n = A,T,C or G
ctggcaagagacttcctgaggcacatcagctacgttggtcaatttagggcacggtctggntctgcagctttgaaaggtggattctttctattagcacactttnntaagagggattgtaaaggattaacntcantcaccagaaacgaaacaccacttcagaaattcagagacctctgatcaacagaacagacatttgggctttaactgctaaagcagctacctacttggggaaaccatggcattctgctgcctggacagcnggaannaagagagatttcagagttactggcacgaggacaaagcctntcagctngct

SEQ ID NO: 1516 - DNA, 314 bp, Homo sapiens
  misc_feature 241, 269, 293: n = A,T,C or G
ccatggcactctgatcatggttatatccaagaaagcataaaataaccaatgtcctgatatgcaatctggatgtgcagcatttacagcaaacaacataaaaagaaagaaagaagaatggaaaagtaaagaagaaaaaaaccaccacaaagtcccaaacctcagaaattaacattcacttaagaacacagtggtgaagacttttggtagcaaaatttgcacggttcttaaaatgggagtcttnaaaagtacttcttcaaattcaaaagctnagaaaaccaaagagggaacagttncacaggcttagtggagatgcc

SEQ ID NO: 1517 - DNA, 357 bp, Homo sapiens
  misc_feature 327, 332, 354: n = A,T,C or G
aaagatttctgttaatttgaaagaacaaaaacaagacagaacttctggtactctaatcaggatgattcctaacaagtcagtcatttgtgaacttagtggactttttggttactttaatttgcatatattctccagttacatcggactctatctgtggccttgttcttcatttcagtgttaatcagctaaacagaagttgttgcttatgatgtgtgagtgaacatatgccactgcctggcctttttttcttcagagcttgttgtctttttcgctatattagactttgcagtatgcccagaagctttccttcataaaatagaaagaaanaaacntttggcttatttttcactgtancta

SEQ ID NO: 1518 - DNA, 534 bp, Homo sapiens
cctcggtggagacgcagaccccatgaagaggaaaccctggacatccctgtccagcgagtctgtgtcctgcccccagggatcgctgagccctgcaacctccctaatgcaggtctcagaacggccccgaagcctccccctgtcccctgaattggagagctctccttgatgccctctgttagggcccaccccaatcccagggcagaaggacatgagggagcaaagagcttgaggaatgccatactccggctggtccgggacatggaaattcggactcagggaggacccgggctgggcaatgactgggagacttgcccgggttcccaggacttgggggtcctgactcccagccctcatcctgccttacccctctgttcccagccccagcctttctaagccattgggaatagaatggccccttttgttctggtgtctaggggtgattgtgccaaagctcttatttccagtgccaagcccccagaggcttgtaagagttgggatgagggatggagagggactgggtctctgggaacaggt

SEQ ID NO: 1519 - DNA, 414 bp, Homo sapiens
ctggatctttccggggattcagtcaagaccatcgccaagctatgggatagtaagatgtttgctgagattatgatgaagattgaggagtatatcagcaagcaagccaaagcttcagaagtgatgggaccagtggaggccgcgcctgaataccgcgtcatcgtggatgccaacaacctgaccgtggagatcgaaaacgagctgaacatcatccataagttcatccgggataagtactcaaagagattccctgaactggagtccttggtccccaatgcactggattacatccgcacggtcaaggagctgggcaacagcctggacaagtgcaagaacaatgagaacctgcagcagatcctcaccaatgccaccatcatggtcgtcagcgtcaccgcctccaccacccaggggcagcag

SEQ ID NO: 1520 - DNA, 203 bp, Homo sapiens
  misc_feature 148, 193, 196: n = A,T,C or G
ccaacagtgtatccatcacgttagccctgctggagggaagggacccacattcacctgccctctgacctgccccttgatcccatatctattaccgtgtccataggaataataggtaagggctctgtctctgtcaagccatgtaacaaangacactgttaaaaaaaagaaacaaagtctggcatcagagggagcntgnggagagc

SEQ ID NO: 1521 - DNA, 492 bp, Homo sapiens
  misc_feature 408, 439: n = A,T,C or G
ccggcggtggggctggacgcaggtgcaactgacatgggtgaaccccagggatccatgcggattctagtgacagggggctctgggctggtaggcaaagccatccagaaggtggtagcagatggagctggacttcctggagaggactgggtgtttgtctcctctaaagacgccgatctcacggatacagcacagacccgcgccctgtttgagaaggtccaacccacacacgtcatccatcttgctgcaatggtggggggcctgttccggaatatcaaatacaatttggacttctggaggaaaaacgtgcacatgaacgacaacgtcctgcactcggccttcgaggtgggcgcccgcaaggtggtgtcctgcctgtccacctgtatcttccctgacaagacgacctacccngatagatgagaccatgatccacaatgggccnccccacaacagcaattttgggtactcgtatgccaagaggatgatcgacgtgcg

SEQ ID NO: 1522 - DNA, 437 bp, Homo sapiens
  misc_feature 388, 389: n = A,T,C or G
ccacctggagacggtgattttgggcctattgaagacacctgctcagtatgacgcttctgagctaaaagcttccatgaaggggctgggaaccgacgaggactctctcattgagatcatctgctccagaaccaaccaggagctgcaggaaattaacagagtctacaaggaaatgtacaagactgatctggagaaggacattatttcggacacatctggtgacttccgcaagctgatggttgccctggcaaagggtagaagagcagaggatgactctgtcattgattatgaactgattgaccaagatgctcgggatctctatgacgctggagtgaagaggaaaggaactgatgttcccaagtggatcagcatcatgaccgagcggagcgtnncccacctccagaaagtatttgataggtacaagagttacagcccttatg

SEQ ID NO: 1523 - DNA, 315 bp, Homo sapiens
ctgctgcagctccccaggggccagccccgcctctgcgtctgggtctccatcccaagaccattcaccctccgagttgctgctgtcctcctcgccctcctcctcgtcctcttcatcgtcttccaccccatgccgagtgctcaggggcctcagtatccctctctccgagaatccctcggtgtcgtcctcttcagagctgttcaggtcaaagaggtctttaaattgcttcctgtcctcatccttcctgtcagccatcttccttcgtttgatctcagggaagttcaggtcttccagccgctctttgccactgatctccag

SEQ ID NO: 1524 - DNA, 269 bp, Homo sapiens
agcgggtgaagaaattagaagaagtggaaaggaaaaaacgccaaagggagttggaaattgaagaacgagaacggcgtagagaggaagagagaagacttggcgatagttccctttctagaaaggactctcgttggggagatagagattcagaaggcacctggagaaaaggacctgaagcagattctgagtggagaagaggcccgccagagaaggagtggagacgtggagaagggcgagatgaggacaggtctcatagaagagatgaagag

SEQ ID NO: 1525 - DNA, 413 bp, Homo sapiens
aaaaaccatggcattccttaagattgcagatctcaaattatagtaaaataagttgagtttaagaaaatgaagagtataagtttgattagggatggagggtgagaggagcttgccagatgggccatatcataataggctttatattctttgcaaaagcaattggattttatcttgtagtcaatggggagcaaattaaaagattttaagtggtgtgtattctaaaaagatcactgtgggatgggtggctggcaggggatgggaggatgaagaaaagttgggtaatgggggccgggcacggtggctcactcctgtaatcccagcactttgggaggccgaggcgggcggatcaccgaggtcaggagatcgagaccatcctggctaacatggtgaaaccccatgtctactaaaaatac

SEQ ID NO: 1526 - DNA, 441 bp, Homo sapiens
  misc_feature 408: n = A,T,C or G
ccatgctgggggaacagttcatggttggggaggagatctgtggggctgtggtgtctgtccgctttcaggaagacattatttcaatatggaataagactgccagtgaccaagcaaccacagcccgaatccgggacacacttcggcgagtgcttaacctacctcccaacaccattatggaatacaaaactcacaccgacagcatcaaaatgccaggcaggctgggcccccaaaggctcctttttcaaaacctctggaagccgcggttgaatgtgccatgaccctctccctctctggatggcaccatcattgaagctggcgtcatcggagtctcttgttctgttggcgtgctacctggaagatccttctgtcctggacaagaggaattggaagagcattttatgttttaangaacaggctgacacgcagcagctacaacaacag

SEQ ID NO: 1527 - DNA, 441 bp, Homo sapiens
ctgcagcattacatgaaagaaagcgcccagcttctgtcggaaaaaatcgcgttcaaaacctcggatttcagccgaggctctcctaatgccaagcccaaagttttcacttgcgaagtgtgtggaaaggtctttaatgcgcactataacttaacccgtcacatgccagtgcacacaggagccagacccttcgtttgcaaagtgtgcggaaaaggtttcaggcaagcaagcaccctgtgcaggcacaagatcattcacacgcaggaaaaacctcacaaatgtaaccagtgtggcaaagcatttaatagaagttccactttaaacactcatacccgaatacacgcgggctacaaaccgtttgtgtgtgaattctgtggcaaagggtttcatcaaaaagggaattacaaaaaccacaagttgacccacagcggggagaagcagttc

SEQ ID NO: 1528 - DNA, 467 bp, Homo sapiens
ctgactttgtcgaacaagtgaatccctctgaaataacgcttccacaactgttttttcactggcattaacagcagtaactgcgaatacactttcctcttctaatgcagactgtattctgtctctatacaaagaagccagcagcctccatgtgaccatctcctgttgaagaagccagagcatactggctgtttttgaaaatttttgaagtccaggtgttgctcgactcactattttactcagtatattcacctgactaccacagatgttttcatactcttccacaagatcaaaaactgtactcgaagagtgcttcagaaaagactgcaggaaatcagaaaacatactcatggatgcagcttctccaggatcatcctcacgtaacataacagcactgatagttacatcttctgttatactgtggggctctgtgtttgtgaacagcccggaacgctgtgatgaaaatgcag

SEQ ID NO: 1529 - DNA, 266 bp, Homo sapiens
  misc_feature 257, 262: n = A,T,C or G
ctggcttcactgctcaggtgattatcctgaaccatccaggccaaataagcgccggctatgcccctgtattggattgccacacggctcacattgcatgcaagtttgctgagctgaaggaaaagattgatcgccgttctggtaaaaagctggaagatggccctaaattcttgaagtctggtgatgctgccattgttgatatggttcctggcaagcccatgtgtgttgagagcttctcagactatccacctttgggtcgntttgntgtt

SEQ ID NO: 1530 - DNA, 384 bp, Homo sapiens
  misc_feature 290: n = A,T,C or G
ccaggctggtctcgaactcctgaactcaggtgatccgcccacctcggcctcccaaagtgttgagattacaggcatgagccacgtgcctggcccagtcatcggatttagggtccaccctaatccatgataacctcatgtctgtctacaaagaccctatttccaaataagcccatattctgaggtgaattctcagaatatgaattctcagaatatgaatatgaattctcagacatgaattcttgccagacactactcaatccagtggagcaggggagctgggactctccccngatggcaatagggagccacagaggctgtgtgagcaggggcagaatgaggtcagatgtgcctgtcagaaagccctgcagccccatctcatccagg

SEQ ID NO: 1531 - DNA, 485 bp, Homo sapiens
tactgtggctagccgcctttcagacactaaagctgctggggaagtcaaagccttggatgacttctataaaatgttacagcatgaaccggatcgagctttctatggactcaagcaggtggagaaggccaatgaagccatggcaattgacacattgctcatcagcgatgagctcttcaggcatcaggatgtagccacacggagccggtatgtgaggctggtggacagtgtgaaagagaatgcaggcaccgttaggatattctctagtcttcacgtttctggggaacagctcagccagttgactggggtagctgccattctccgcttccctgttcccgaactttctgaccaagagggtgattccagttctgaaaaggattaatgattgaaacttaaaattgagacaatcttgtgtttcctaaactgttacagtacatttctcagcatccttgtgacagaaagctgcaagaagggcactttttgattca

SEQ ID NO: 1532 - DNA, 562 bp, Homo sapiens
aaagcaacaaagtaaaataaaatcccccaaatgacaaggtatcagaaatccagacttcgttacactctatttgtgaaaatgttcagccattttattgttctgtaaaggaaccatcatctgggtcaaaaatgaattctataaatcaaagaatattctacaccttggaaaagaaaatcagcagtaacattctcactgaatattgtaaattacatttttcttcataaaaggtacatactattctgcacttttccaccaaaagcagtggtgtgttatgcttgttatataaaaaaagttatatcctgtggcaggaaaaaccctttctctttcacttttactaaacaactggagaaaatgttcaagtctgtataaagttgcctataagctggaaagtgaacttgttcaatctccatttacattttagtgcattttttgacaattgtcacatttttaacaaaagtaagaaaatgcatatagcactaaagagtgtttcatcaaatgcttaagggattaaaaaatatggagcagagaacaaaatcattgtgaatggatgaactgttgtaaa

SEQ ID NO: 1533 - DNA, 305 bp, Homo sapiens
cctcggtgggtcttgcggggcagcttcttggtgtgccaacgactggtgacccctttgtagcctttgcccttggtcaccccgatgacgtcgatcatctcatcctgcccaaacacttggttcacaggtacctgctgctcaagcctctcgcgggcccagtccagcttctcggccacagtgcctccgttcacctggatctccatcaggtgggccttcttctggcgcagaggaagcaggcgcatctgggtgtgggcaatgacacggatgacttggcagtacttcttcatgctgctgaagtccttctccag

SEQ ID NO: 1534 - DNA, 348 bp, Homo sapiens
ccaaagtggaacaggtgaagttcgatgccacatccatgcatgtcaagcctcaggtggctgcccagcagaagatggtagatgatgggagtggggaagtgcggggcagccaggccagccaagatgaaattacagcatcagcttatcaagccgtcatcctggaccagaagtacaatggtgaaccagtccagatccgggtcccaatgggcaaggagccacctcatcttatgtccatcttcaagggacgcatggtggtctaccagggaggcacctcccgaactaacaacttggagaccgggccctccacacggctgttccaggtccagggaactggcgccaacaacaccaagg

SEQ ID NO: 1535 - DNA, 350 bp, Homo sapiens
cgaaaggggagttcaaggagacgggggcgacgcggctgagggcttctcgtcggggtcggggctgcagccgtcatgccggggatagtggagttgcccactctagaggagctgaaagtagatgaggtgaaaattagttctgctgtgcttaaagctgcggcccatcactatggagctcaatgtgataagcccaacaaggagtttatgctctgccgctgggaagagaaagatccgaggcggtgtttagaggaaggcaaactggtcaacaagtgtgctttggacttctttaggcagataaaacgccactgtgcagagccttttacagaatattggacttgcattgattatactgg

SEQ ID NO: 1536 - DNA, 106 bp, Homo sapiens
ccacggcgcttggaatcctggttgttgctggatgctcttttggtatctcctaatcgcaaaaaaagtgacagcctgaagcagccacaaaatcctgtgttagaagcag

SEQ ID NO: 1537 - DNA, 442 bp, Homo sapiens
cctggtctccacgagctccgtgtcctgggtctggtcctccccatcccgctgccaggtcagtgtgatctccgcagggtagaagcccagggcccagcacctcagggtggcctcatggtcagagatggggtggtgggtcatatgtgtcttgggggggtccgtgcgctgcagcgtctccttcccgttctccaggtatctgcggagccactccacgcacgtgccatccaggtaggctctcaactgctccgcctcatgggccgcctcccacttgcgcttggtgatctgagccgccatgtccgccgcggtccaagagcgcaggtcctcgttcagggcgatgtaatccttgccgtcgtaggcgtcctgccggtacccgcggaggaagcgcccgtccgaccccacgtcgcagccatacattatctggatggtgtgagaaccggcctcgctc

SEQ ID NO: 1538 - DNA, 423 bp, Homo sapiens
  misc_feature 404: n = A,T,C or G
ctgaagagtcaacttgggcctggaggactgataaagtttgtgattttgagggcctctaaaagtattaaagcagcagcagccgctgcacgcagacatgagggctaggctaaaacagtaaggtcaagttgtttggacagaaaggctacagggtgtggtcctggctcttgtgtaagaattccgaccacgctaaccatgcctaggaaggaaaagagttgttgttttgtagaaggtgctggggtttgagagatcagtcggacacgattggcagggaaagcacgtgtgcttttacgagaattacgccgagataggtaacagatgaggaagaaatctgggcttgactgaagtaatgggggctgtctgtgaagctttgcagcagtacagcccaggtaatttgctgagcctanggggtgtcagggtcagtct

SEQ ID NO: 1539 - DNA, 465 bp, Homo sapiens
ccaccattatgtctgggtcaaaggccaaggtccggaaagcgctgcaattagaagtggatcggttggaagaactgaaaatgcaaaacatgaagaaagtgattgaggcaattcgagtggagctggttcagtactgggaccagtgcttttatagccaggagcagagacaagcttttgcccctttctgtgctgaggactacacagaaagtctgctccagctccacgatgctgagattgtgcggttaaaaaactactatgaagttcacaaggaactctttgaaggtgtccagaagtgggaagaaacctggaggcttttcttagagtttgagagaaaagcttcagatccaaatcgatttacaaaccgaggaggaaatcttctaaaagaagaaaaacaacgagccaagctccagaaaatgctgcccaagctggaagaagagttgaaggcacgaattgaattgtgggaacagg

SEQ ID NO: 1540 - DNA, 296 bp, Homo sapiens
  misc_feature 7, 138, 182, 183: n = A,T,C or G
acctctngatgtcaccatggagacatcaagaggtcatgattgcagaagaggtgactggaattgaatgacatgatccaggggaggccggccacaaatgcagtaacatgaccaggatgggccggtggggctggtcaggtnacagtgtgagggacagaacggaccccttcactctggcctcctgnnggtctccaggtgtgacaggatccagcccgctggcaggaggaaggtcacgaagcaggaggtaagcccaacggccaattccatgatcccaagcttcccctccggcggcaacgaat

SEQ ID NO: 1541 - DNA, 143 bp, Homo sapiens
  misc_feature 27, 75: n = A,T,C or G
ttttttttttttttttttttttttttngatgttaatgactttactttgagatatgatggaaaaatattacaggtncacatggaaaagacatgatcaccaagtgaaaacaatctaaccagaaagctttaacatctgtcagttaa

SEQ ID NO: 1542 - DNA, 430 bp, Homo sapiens
ctgagagcactgactcaggcggggcaccctcaccaagtaagcagggggcattcagcatgccctctggttctgacccagagagaggggactgaaaataaaccctcttttgctctgtggctggcccactggctcaacatgagcgcttggcttggctgtgcctcatgagagagggagggagagagaggctttctgggccagagatgtttctgggagggtttgccagccttgtcttgagccatcagtgtggcaggggagcacaggggtgtaggtggagacactgcggaggccacgtgaaagtggcagctagctctactttcaaaagagaagcagtggttcagtgaccctgagcattctgtgtgcaggagggagctgcctggacagcaagtcatcactgcctctgaatacacacaaaggaggctgcctgtccagg

SEQ ID NO: 1543 - DNA, 335 bp, Homo sapiens
  misc_feature 207: n = A,T,C or G
ctggaagaacaattaagaataatggatcagaccttgaaagcattaatggctgcagaggataagtactcgcagaaggaagacagatatgaggaagagatcaaggtcctttccgacaagctgaaggaggctgagactcgggctgagtttgcggagaggtcagtaactaaattggagaaaagcattgatgacttagaagagaaagtggcncatgccaaagaagaaaaccttagtatgcatcagatgctggatcagactttactggagttaaacaacatgtgaaaacctccttagctgcgaccacattctttcgtcttgttttgttttgttttgttttt

SEQ ID NO: 1544 - DNA, 499 bp, Homo sapiens
  misc_feature 29, 397, 398: n = A,T,C or G
aaattttagaaaacctgtataaattactngtgcataacttaaagattattctgcctttggctaattgagtaattcccctccagcactagagaccgctcagtgctcttactagatgaactcagtaacgccttgagctgggttgattgaggatgtgtgaaaagctcacagagcccgatgcctgctgctatttcacggcaatgagcctttttctttctacactgaagattttcttcttatttaatgtggtttattttgggctcagaaataattgctctgttgaaaataatcctttgtcagaaaagaaggtagctaccacatcattttgaaaggaccatgagcaactataagcaaagccataagaagtgggtttgatcgatatattaggggtagctcttgnnttttgttaacattaagataaggtgactttttcccccctgcttttaggattaaaatcaaagatacttctatatttttatcactatagatcatagttattata

SEQ ID NO: 1545 - DNA, 95 bp, Homo sapiens
ctgcatgatgaagttcactgtcaaggactgtgatcccaccactggggagactgatgacgaaggctatgaggatgagtatgtgctggaagatctgg

SEQ ID NO: 1546 - DNA, 460 bp, Homo sapiens
ccttgcgcctgctaggaagtggcacatcttcctgctcagggcaccaaggtggttcagaaacgttaaggacgagccacagcgaaaagccgcagtcctcacaggcaagaagggataaataaatatgaggtgacccgcagcagctctcacctgggctggtgtgtcacaaccctgacccacccctaaaaaaaaaaaaatcaagaagcaacatcctaaggagaacagggccctactctacacagccctttctgagatgatcggcatacagcaggtgatgcaggctgcacactcagcagattcagcggctggaaacagcaagtgggtttcttcggatgaaagggaagaattcagtccaactgcaggaggggtgggagaggttccagatcctgggaaccacatcaccagacctcggccctttttgccaagtgacccccaccccaccctgatgtggtctacagggccc

SEQ ID NO: 1547 - DNA, 476 bp, Homo sapiens; identical to SEQ ID NO: 626

SEQ ID NO: 1548 - DNA, 316 bp, Homo sapiens
ctggaacagatgctcactgcgctggaccagatgcggagaagcatcgtgagtgagctggcggggcttttgtcagcgatggagtacgtgcagaaaactctcacggacgaggagctggctgactggaagaggcggcaacagattgcctgcattggaggcccgcccaacatctgcctagatcggctagaaaactggataacgtcattagcagaatctcaacttcagacccgtcaacaaattaagaaactggaggagttgcagcaaaaagtttcctacaaaggggaccccattgtacagcaccggccgatgctggaggaga

SEQ ID NO: 1549 - DNA, 162 bp, Homo sapiens
aaaatattttagataattcttaaactatgaaccttcttaacatcactgtcttgccagattaccgacactgtcacttgaccaatactgaccctctttacctcgcccacgcggacacacgcctcctgtagtcgctttgcctattgatgttcctttgggtctgtg

SEQ ID NO: 1550 - DNA, 141 bp, Homo sapiens
ctgtgccgggtggaggagatgcgccagtccctgagaattatcgcacagtgtctaaacaagatgcctcctggggagatcaaggttgatgatgccaaagtgtctccacctaagcgagcagagatgaagacttccatggagtca

SEQ ID NO: 1551 - DNA, 263 bp, Homo sapiens
aaaaaaaacaaccaccaaaaaaaatcaattggctaaaaaaaaaaaagtattaaaaacgaattggctgagaaacaattggcaaaataaaggaatttggcactccccacccccctctttctcttctcccttggactttgagtcaaattggcctggacttgagtccctgaaccagcaaagagaaaagaagggccccagaaatcacaggtgggcacgtcgctgctaccgccatctcccttctcacgggaattttcagggtaaactgg

SEQ ID NO: 1552 - DNA, 332 bp, Homo sapiens
ctcttttataaagctgatgttctgagcgaagaagcaatactgaaatggtataaggaagcacatgttgctaaaggcaaaagtgtttttcttgaccagatgaagaaatttgttgagtggttacaaaatgcagaagaagaatccgaatcggaaggtgaggaaaattaaatggctcaacaagcacaatacctaggttaccacacaccactttttgattgggaatgctgaaccatttgagaagagaaacttggcttctgttttcgcaaaggaaaaaaaaaataggataggcttcccttgtgcagagggagaaatggctttgtttttgttttgttttt

SEQ ID NO: 1553 - DNA, 389 bp, Homo sapiens
  misc_feature 365: n = A,T,C or G
ttttttttttttttttttatgtgttgtcgtgcaggtagaggcttactagaagtgtgaaaacgtaggcttggattaaggcgacagcgatttctaggatagtcagtagaattagaattgtgaagatgataagtgtagagggaaggttaatggttgatattgctagggtggcgcttccaattaggtgcatgagtaggtggcctgcagtaatgttagcggttaggcgtacggccagggctattggttgaatgagtaggctgatggtttcgataataactagtatggggataaggggtggtaggtgtgccttgtggtaagaagtgggctagggcatttttaatcttagagcgaaagcctataatcactgngcccgctcataaggggatggacct

SEQ ID NO: 1554 - DNA, 245 bp, Homo sapiens
aaacagacctttagtgactgaggtgtggtttaggacttcaaggttggatggcccaggcgggaaacagagtggagagctcagtaggccgtctgagactgctgctggcggtagccaccgcggcgcatgtagccctcgtttttgcggtagccgtccttctggtctcggaagtagcccccgtaggtgccctgcttgtggtcaaacacccgttcgttgttctccaccaggctgcccagcttctcggccag

SEQ ID NO: 1555 - DNA, 161 bp, Homo sapiens
aaagcacaactagctatttgtttacaaatgatatttttatgtatattttgtatagtgtatcatcatttttgccaaatatgtttttcattataaatgagtaaagagtacttaaggttgcattcacgtattacatgtttgttgttgtaaacctctccaatcag

SEQ ID NO: 1556 - DNA, 300 bp, Homo sapiens
aaaccaggggctcggatcaaccaggaccacaagcacaaatacatccacatcttggcgtacgcagcaagcgtggttgagacctggaagaagaacaagcgagtgagcatcaataaagatgagctgaagtcaacgtcaaaagctgtcgaaaccgttcacaatttgtgttgcaacgagaacaaaggggcctctgaactagtggcagaattgagcacactttatcagtgtattaggtttccagtggtagcaatgggtgtgctgaagtgggtggattggactgtatcagaaccaaggtactttcag

SEQ ID NO: 1557 - DNA, 379 bp, Homo sapiens; identical to SEQ ID NO: 487

SEQ ID NO: 1558 - DNA, 218 bp, Homo sapiens
gctgtctagttttgtttttgttttgagatggagtttcactcttgttgcccaggttggagtgcaatggcacaatctcagctcactacaacctccgccttccaggttcaagcaattctcctacctcagcctcccaagtagctgggattacaggcatgcaccaccatgcctggctaatatttttttgtatttttagtagagatggggtttcaccatgttgg

SEQ ID NO: 1559 - DNA, 481 bp, Homo sapiens
  misc_feature 354: n = A,T,C or G
aaaatgttttatttcatagctcataaaaaagtatgtatgtacaagactcaagtaaatagaaaggcagctttcaatcacaaatcagtttttcagattttactgtggaagcatatttaatgcacacatttgaatgttacacataaataattttaacgatggagtccaagttctggattttacattagatctgcatatataagacacttgtggtcaaatttcaagattggtaaagccagtttcaagctgcttatattttgagtacaggtttcactattacaaatatatgatgttaaactaacaaactcatgaccttcaaagatgtcttcgtcccacgcacacacatttgtaatttgngtccatttgctatttcccttcttctataatcttcaaattatatagttatgcattgagttccctatgcatctcacccatctcctttatctcagccttctcatactttgccattctcttctttctggaa

SEQ ID NO: 1560 - DNA, 157 bp, Homo sapiens
  misc_feature 1, 2, 17, 18, 60, 86, 124: n = A,T,C or G
nnaaaagaaaaagaagnnaaaagatggaactgagaaagaaaaggatattaaaggactcancaaaaagagaaagatgtattctgaanataaacctttatcatctgagtccttgtcagaatcagantatattgaggaggtgcaagcaaaaaagaagaaa

SEQ ID NO: 1561 - DNA, 306 bp, Homo sapiens
ctgtttcagcaccttcgtctggctggtctctcggatttcgccagccaggaacatctcgtccacgaccgtgtaaaccttgtagaagttgaacaccaggtccagttcacagacattgtggaaatattcgtttaagacctccacgaagttgtgaatggcctccaggtaagccaggttgttgtcattgacatccacacagatgcagaagtagaggccagcatagcggcggtaaatgatcttaaagttccggaactccacaaagttggtgtgtttggcgtctcggacggtgaccacggcatgcacctcctc

SEQ ID NO: 1562 - DNA, 418 bp, Homo sapiens
  misc_feature 236: n = A,T,C or G
aaaagcttaaaacagaaacagccatttatttgctcatgattctgtaacttgggcagggcttggcagggtcagctagtctttgctgaggtaacttgactggggctaaagatgcaagatggcttcacccagcttctcagttgggggctggcgtggctggaagacagcaggcccttcccttttcctttagagtctctcatcctccagggcctcattttcttcaggtgctatctctctcntgcagcacaaacttctttacatcacagctgtgcctttggagctggacatccaggtacctggctgcctgctgggaacaggtgagtatgtatcagccattgtgaagcctcaaaaggctgcagcctgacgtagctgcagatcaggctgtacccaaattgcattgttactgatgaaataatttttt

SEQ ID NO: 1563 - DNA, 389 bp, Homo sapiens
ctgacccccctttgtccacagctaagatggcagcagaatgctatgtcactatatacagaaacaagacaacctgaagctaaatggatgccccctgcagagtcaacaggtccagcctcacagtgcacgccctgagctacagcctctcccaaaaggcatcttccccacagcctcaacgccgagcaaggagcatcaagggtttgtctcggttgttttgttctttttacaaactatagatatatacagttgaaaactcaggatttctagccaataaccatagttaccaccaccttacaaataaaaagaaaatgccagaaacatctttaaatgccttgtcacaccaacagcaaagtgcacagagtgaggagaacacgagagtgccttttcatttt

SEQ ID NO: 1564 - DNA, 200 bp, Homo sapiens
aaacatctcacatatacaaaataggtacaatttaatttttctgcttgcccaagaaacaaagcttctgtggaaccatggaagaagatgaaaatgagactggcaaagaacaaatgctgaatctgaagaagatttgggcaaataatctgcatacttttaattgggaataagatggaaaatatgaatgctaaatcaaatttttt

SEQ ID NO: 1565 - DNA, 514 bp, Homo sapiens
  misc_feature 415, 416, 432: n = A,T,C or G
aaatgaaggatttaccattaagaaatcaacatgtgcacaaaaagagtaaaaattaccaaaaaattaaagattttttgggacaattcacatgttcaaaatttaagaatgatttaaactgtgcaagtacaaatgtctttcctattataataacccatatacaggttgcactattccacatcaaggaacttgcctcctacggaagcaaatcctgcttttagaaaaacaaacagtagcttgaaaagaacagttagtccttacaagaaagtcttaaactttgccctctgtggctgttagccaaaaaaccataagcacttcaggctttgtacagaagacaaacacagccagatcacatttcctcctcattgctaacctttaaaataaaaatagcactagattttaaaactacttcatgtannctgtcagtactgaatnatgtcacattatataaataaccctgtaacgagattcaatatctaaactttatagtttactagctgcaaaggtaatacaccat

SEQ ID NO: 1566 - DNA, 508 bp, Homo sapiens
  misc_feature 418, 432, 503: n = A,T,C or G
ccatgagctgagttgtgacttctgggaactaattgggttggcccctgctggaggagctgacaacctgatcaatgaggagtctgacgttgatgtccagctcaacaacagacacatgatgatccgaggagaaaacatgtccaaaatcctaaaagcacgatccatggtcaccaggtgctttagagatcacttctttgatagggggtactatgaagttactcctccaacattagtgcaaacacaagtagaaggtggtgccacactcttcaagcttgactattttggggaagaggcatttttgactcaatcctctcagttgtacttggagacctgcctcccagccctgggagatgttttttgtattgctcagtcataccgggcagagcagtccagaacacgaaggcacctggctgagtacacntcacgtggaagctnagtgtcctttcctgacttttgacgacctcctgaaccggttggaggacttggtttgtgatgtggtagatcgnatatt

SEQ ID NO: 1567 - DNA, 153 bp, Homo sapiens
ccaagtcttcacaaacccttgcaacattgcctgaagtttatggaataagatgtattctcactcccttgatctcaagggcgtaactctggaagcacagcttgactacacgtcatttttaccaatgattttcaggtgacctgggctaagtcattt

SEQ ID NO: 1568 - DNA, 452 bp, Homo sapiens
gacctgcccgtgaagaggcgggcatgacacagcaagacgagaagaccctatggagctttaatttattaatgcaaacagtacctaacaaacccacaggtcctaaactaccaaacctgcattaaaaatttcggttggggcgacctcggagcagaacccaacctccgagcagtacatgctaagacttcaccagtcaaagcgaactactatactcaattgatccaataacttgaccaacggaacaagttaccctagggataacagcgcaatcctattctagagtccatatcaacaatagggtttacgacctcgatgttggatcaggacatcccaatggtgcagccgctattaaaggttcgtttgttcaacgattaaagtcctacgtgatctgagttcagaccggagtaatccaggtcggtttctatctacttcaaattcctccctgtacgaaagga

SEQ ID NO: 1569 - DNA, 479 bp, Homo sapiens
  misc_feature 438: n = A,T,C or G
ccagtgaaggcaccaacatcccaagtcctgtggtgcgccagattgacaagcagtttctgatttgcagtatatgcctggaacggtacaagaatcccaaggttctcccctgtctgcacactttctgtgagaggtgcctgcagaactacattcctgcccacagtttaaccctctcctgcccagtgtaccgccagacctccatcctgcccgagaaaggggtggccgcgctccagaacaatttcttcatcacaaacctgatggacgtgctgcagcgaactccaggcagcaacgctgaggagtcttccatcctggagacagtcactgctgtggctgcgggaaagcctctctcttgcccaaaccacgatgggaatgtgatggaattttactgccagtcctgtgagactgccatgtgtcgggagtgcacggagggggagcacgcanagcaccccacagttccactcaaggatgtggtggaacagcac

SEQ ID NO: 1570 - DNA, 505 bp, Homo sapiens
aaaataaagaggcgccaatacccgttcatttatgtattagaagtctcgtataatcaccaataaaacagaaatagcatctgtgatcacacaacggagaaaaaagatcaagagacaaccttagccactgtaaaactgtacttgaacactcagatgctctggctaagtcagaatctaaagatttgctaataaggttttattggtttagcatagtcccatggcctttgtctataactgatatgtggaaaccgttcccaaggaaatttaagaaaccattctgaaattctgcctttgatgtacattataattaaatgtgactgttataaacgttgcctctatcatattatcttttgtaaagtggaggcaaagagagacaaaaagcatcctcctggactgctgacatgcagaaagcatcagcaatgatagggttgtgacagcatttatggagtttctagggcaggggggacagaatgctgtatctcagcatctttggttaaggtctggcctc

SEQ ID NO: 1571 - DNA, 469 bp, Homo sapiens
ctgagtacaaggttatcactgtgatagaacctggactgctttttgagataatagagatgctgcagtctgaagagacttccagcacctctcagttgaatgaattaatgatggcttctgagtcaactttactggctcaggaaccacgagagatgactgcagatgtaatcgagcttaaagggaaattcctcatcaacttagaaggtggtgatattcgtgaagagtcttcctataaagtaattgtcatgccgactacgaaagaaaaatgcccccgttgttggaagtatacagcggagtcttcagatacactgtgtcctcgatgtgcagaagttgtcagtggaaaatagtattaacagctcactcgagcaagaaccctcctgacagtactggctagaagtttggatggattatttacaatataggaaagaaagccaagatttaggtaatgagtggatgagtaaatggtggagga

SEQ ID NO: 1572 - DNA, 361 bp, Homo sapiens
ccacaaacacctctcggcggccaggctgtttcagtcgaccacggcacacttccccaaattcccctgcagggcacagggcacaagctatgactcactcctgtacccagcccgcctcagcttctcatctctactgtgccccgggagactcaccagctccgatcacctcctcgatcttgacgcaggacacgtcgatctccttggcaaactcccgaacagcctcattagggtcctcgtaggtaaaagggtcaatataaaccttcattccaggagcaactggagggagaagaggtgggcgtgagagggtaacgtcaagccagcctctccctgcgatgggcacagctccagcaggctccctgctgag

SEQ ID NO: 1573 - DNA, 295 bp, Homo sapiens
  misc_feature 202, 208, 232, 234, 273: n = A,T,C or G
ttgtacaagcttttttttttttttttttttttttttttatctcatgcgttccatttattttgtctctcaaattttaggaatcttctcctttaattaactcatcaacctctcatggcaagaatttgagaaagtaaatttatactcaggttctaattttaatagggaaggaagaagttacagctcagtgcaccatgaagttganacaganatggagacacctcagccccacctntntggaacaggaaagatgattggggagggagcacaggtcancgtgggaagagggtcatggtgg

SEQ ID NO: 1574 - DNA, 547 bp, Homo sapiens
  misc_feature 473: n = A,T,C or G
cgacattccagaaaatgtcgacattactctgaagggacgcacagttatcgtggagggccccagaggaaccctgcggagggacttcaatcacatcaatgtagaactcagccttcttggaaagaaaaaaaagaggctccgggttgacaaatggtggggtaacagaaaggaactggctaccgttcggactatttgtagtcatgtacagaacatgatcaagggtgttacactgggcttccgttacaagatgaggtctgtgtatgctcacttccccatcaacgttgttatccaggagaatgggtctcttgttgaaatccgaaatttcttgggtgaaaaatacatccgcagggttcggatgagaccaggtgttgcttgttcagtatctcaagcccagaaagatgaattaatccttgaaggaaatgacattgagcttgtttcaaattcagcggctttgattcagcaagccacaacagttnaaaacaaggatatcaggaaatttttggatggtatctatgtctctgaaaaaggaactgttcagcaggctgatgaa

SEQ ID NO: 1575 - DNA, 375 bp, Homo sapiens
ccacatcatgtcacttacacccacaacagctctgaaaggagtatttgatgaacacatctgagccaagagcccagagtctctctccaaggccatgcagtttgttcactgatgggacagtccctcaaaacagccacgctaagtagacagatacagtctccccaaatgttaccaatcttactccccttgaaaacaggcagagtgaagtgcaatgaaagacaagttaattaaaaagccactcacaactggcagtaaattttaatgattgataaaatgcttaaaataattttatgtatcagaaacaaggaacagcttgttactttttcaatgatctcaggaattttgcagacacaaaatctccattattcagctccattt

SEQ ID NO: 1576 - DNA, 440 bp, Homo sapiens
ccaatgcagcagggacatctgcctgggaaggaagttaggatgccccataggtcaccagcaccaccatcatgaacagggacagtaactccagccctggccgaaatgaaatccacatggaaatccaaatgcaagacccacagtaccaagatttggatcatgtattgatcccagattcctcaaatgaagactgggctgtcaggcatgtgtatcccaaatatatgctatgtcatgccctgccccaagtgatgtagagtagacttttccaagccccaaagatttgtcaagttactcatttcatcatccctcgaggtaccttatgaatacctttttttttcttttttttgagatgaagtctcgctctgtcgcccaggctggagtgcagtggcgtgatctcggctcactgcaacctccgtctcccgggttcgcgccattctcctgcc

SEQ ID NO: 1577 - DNA, 474 bp, Homo sapiens
ctgctggaatcatataggtcattaacccttggctatatggcagaagcgtttggtgttggtgtggaattcattgatcaggaactgtccaggtttattgctgccgggagactacactgcaaaatagataaagtgaatgaaatagtagaaaccaacagacctgatagcaagaactggcagtaccaagaaactatcaagaaaggagatctgctactaaacagagttcaaaaactttccagagtaattaatatgtaaagccatgtaactaacaaaggatttgctttagagataattatttggaatttttatagcttacttcacaatgtgcccaggtcagtggaatttattattttaacctctgaaaacactgaccaaatcaagcctcatatttttaagtgctacatataaccttcaccagtgtgatttacataaatatttcctatgttatagatcatgaaaatataaaaataagctagg

SEQ ID NO: 1578 - DNA, 374 bp, Homo sapiens
aaagaagagaaaaacaccttgagccttaaaacggtgctgctgggaaacatttgcactcttttagtgcatttcctcctgcctttgcttgttcactgcagtcttaagaaagaggtaaaaggcaagcaaaggagatgaaatctgttctgggaatgtttcagcagccaataagtgcccgagcacactgcccccggttgcctgcctgggccccatgtggaaggcagatgcctgctcgctctgtcacctgtgcctctcagaacaccagcagttaaccttcaagacattccacttgctaaaattatttattttgtaaggagaggttttaattaaaacaaaaaaaaattctttttttttttttttccaattttaccttcttt

SEQ ID NO: 1579 - DNA, 397 bp, Homo sapiens
aaaaatctcatccttggctaggcacggtggctcacatctgtaatcccatcactttgggaggccaaggcaggcggatcaagaggtcaggagtttgagaccagcccgaccaacatggtgaaaccctgtctctactaaaaacacaaaaattagccaggcatggtggcacgcacccgcaatcccagctactcaggagactgaggcaggagaatggcttgaacccgggaggcggaggttacagtgagccaagatcataccactgcactccagcctgggtgacagagcgagactccgtctcaaagaaaaaataaaaataaaaaaactgaaaaggccaggtgtggtggctcatgcctataatcccagcactttgggaggccgaggtgggtggatcattttgagc

SEQ ID NO: 1580 - DNA, 529 bp, Homo sapiens
  misc_feature 490, 511: n = A,T,C or G
aaacattgcaaattgaccagctagctatggaagcataaaattaattgataattaatgttggaaatacatttctaaaatttatatttttatggtgttagcctgtaagagcattttagcatattgaaatgcatgctgcttaagatgtgtctggttcaaatatcaaaacttgctgggtcatttttacatagtagaaacatactgtctatgtgttgcccaattactgtttgtccactctgaattctggaccctttttggactaagaattagttaaattcatgaactaagagaattagagatggggtagagtaggatcaggacagtggggttacaacagataggaaaggaaagtcagcatttgagtgtagagaaaaaaaggggatcatacagatgtcatcaaattataggctttaatacaggttgctttttttaatccaaaaggaaaagcacttatcctatcagaatgtctaccatgttttatagtaataatttntgtaaaaaattgaatttttgnatagttttttgtattttt

SEQ ID NO: 1581 - DNA, 393 bp, Homo sapiens
gcgcctctccgaacgcaacatgaaggtgctccttgccgccgccctcatcgcggggtccgtcttcttcctgctgctgccgggaccttctgcggccgatgagaagaagaaggggcccaaagtcaccgtcaaggtgtattttgacctacgaattggagatgaagatgtaggccgggtgatctttggtctcttcggaaagactgttccaaaaacagtggataattttgtggccttagctacaggagagaaaggatttggctacaaaaacagcaaattccatcgtgtaatcaaggacttcatgatccagggcggagacttcaccaggggagatggcacaggaggaaagagcatctacggtgagcgcttccccgatgagaacttcaaactgaagcacta

SEQ ID NO: 1582 - DNA, 317 bp, Homo sapiens
ctgtgatgtcttggagaaacagtgtaaaccggcagtgtaaagaagagcagggcatgtatgagtagttgagaacggtgaacgggagtatgactaacagatgaggatgaaatttgggcttcactgaagtaatgggggctgtctgtgaagccttgtggcagtgcagcccaggtaatttgttgagcctaatgggtgtcagggtcagtctaagtgaaggcaaagagaggctgggatgaagggtgcaaagcaatagtaaagaaagcatgtctgagatccagaacagaataatgggtagtagagggaggtattgaggataggag

SEQ ID NO: 1583 - DNA, 272 bp, Homo sapiens
  misc_feature 174: n = A,T,C or G
ccacatcggcagggtcggagccctggccgccatactcgaactggaatccatcggtcatgctctcgccgaaccagacatgcctcttgtccttggggttcttgctgatgtaccagttcttctgggccacactgggctgagtggggtacacgcaggtctcaccagtctccatgttgnagaagactttgatggcatccaggttgcagccttggttggggtcaatccagtactctccactcttccagtcagagtggcacatcttgaggtcacggcag

SEQ ID NO: 1584 - DNA, 250 bp, Homo sapiens
ctgcaggtagacgtgatctttctcagggccacagcctcttccttctcggatctccagagtcatggaccgagacaccacatctctagacgccaggtccttcgcgacaggggcgtatcgctccataaacctttcgccttgactgttaatgagaatgcctccctctccacgacatccttccgtaatgagacaaccagcaccatatatgcctgtggggtggaactgaacaaactctaggtcctggcaaggaagg

SEQ ID NO: 1585 - DNA, 428 bp, Homo sapiens
aaaaacaaaaggttgatatactataaaataagatgcttcagtgcagctccaaaaacctttataaatacagccatttggaaggacgatcctggatcagaaattattccttgtgtatctatattatgtgcatgtctcatttcagttgtcataattgtctctgtaatttcctcctgagtagcggtcataaccaccctggtttctgccattatagtctctggaacgtccatatccatatccataccctccaggtcgactgtcataatacctgccactcccatagccctggtccccaccacctctagagtagctgcgaccacgcccatgggccccaaagccacctcctctggttccccgagcagacttgcctgcatgatccacacggatctgacgaccatccagagactctccgttcatggctctcatggcaa

SEQ ID NO: 1586 - DNA, 265 bp, Homo sapiens
aaaagatccaggtggaaatatttttactatagtaataattctacaaaatacctgaattcttaacactgttatatttcagtataagtggtggctttttcttttcatgtctttgatctggttttattcctgtaattcagccacctgattttgtgaggggggggaataatatgtggtttttgtacaaacatgtttctcagtgtgttgttattttggaaaaaatgaggggagggagtttggcaagaatggagaaaatgaatgaagaagg

SEQ ID NO: 1587 - DNA, 345 bp, Homo sapiens
ctgcccttgtctaggaaggctcatgctttgcttcaatgaagcgaggagaccacagaaatacccatggctgtggggctgtgaccagcagtggctgattagggtggaaactggaaagcgtcactgtctcagcagaagaaagcaggaccccacacagcctggggaacggctgcccacccacgcctcggtgaagaccacggccctggcgaggccccaaggtgcttctgagagatgaacgagacacctcagtcatggcacactgggtggtgtgcttcccctccaagtcctgtctttgttttacacagtcatatgaaagacataaccccattgcccaaatcaagcctggag

SEQ ID NO: 1588 - DNA, 441 bp, Homo sapiens
gaggaaggtggcaagatggtgttggaaagcactatggtgtgtgtggacaacagtgagtatatgcggaatggagacttcttacccaccaggctgcaggcccagcaggatgctgtcaacatagtttgtcattcaaagacccgcagcaaccctgagaacaacgtgggccttatcacactggctaatgactgtgaagtgctgaccacactcaccccagacactggccgtatcctgtccaagctacatactgtccaacccaagggcaagatcaccttctgcacgggcatccgcgtggcccatctggctctgaagcaccgacaaggcaagaatcacaagatgcgcatcattgcctttgtgggaagcccagtggaggacaatgagaaggatctggtgaaactggctaaacgcctcaagaaggagaaagtaaatgttgacattatcaat

SEQ ID NO: 1589 - DNA, 438 bp, Homo sapiens
ccagtttgtgcagttccagtagtgactgattcacatttttttccaaatgtaatgcacactccattgcattcagcccgctctcccagtcatcacagtctggtttcttgatatcctgaaggaagattcggccacctcgttggttctgcagcttcatcagtttctcagcatgttccctctcctcatgagattggtgaagaaagtatttggcaaagttcttcaaagccacatcatcgcggtcaaagtagtaagactgaaaggggaacactgaatgtgttatactagggatccccagagacaggtagctgtgacgatctacagggaggcaagatggtctcgtcagcctaggcttcctttctcaaagcacagcatgaaggaatcagtgcctaaggagactggggggcagatgagctactggattgaacccaagagtaatgtttc

SEQ ID NO: 1590 - DNA, 446 bp, Homo sapiens
gccgccgcttgtgctgcagccatgtctctagtgatccctgaaaagttccagcatattttgcgagtactcaacaccaacatcgatgggcggcggaaaatagcctttgccatcactgccattaagggtgtgggccgaagatatgctcatgtggtgttgaggaaagcagacattgaccccaccaagagggcgggagaactcactgaggatgaggtggaacgtgtgatcaccattatgcagaatccacgccagtacaagatcccagactggttcttgaacagacagaaggatgtaaaggatggaaaatacagccaggtcctagccaatggtctggacaacaagctccgtgaagacctggagcgactgaagaagattcgggcccatagagggctgcgtcacttctggggccttcgtgtccgaggccagcacaccaagaccactggccgccg

SEQ ID NO: 1591 - DNA, 131 bp, Homo sapiens
  misc_feature 10, 11, 18, 37, 42, 68, 81, 87: n = A,T,C or G
ccagcggccnnccgggcnggtccacttccatgccctntccanaccaggagacacctgctgctgacctngtggaaaacttanattttnacattctgatgcttcggaagtggtggctcctcctccctcacccc

SEQ ID NO: 1592 - DNA, 510 bp, Homo sapiens
  misc_feature 502: n = A,T,C or G
cgacgaaggagtaggtggtgggatctcaccgtgggtccgattagccttttctctgccttgcttgcttgagcttcagcggaattcgaaatggctggcggtaaggctggaaaggactccggaaaggccaagacaaaggcggtttcccgctcgcagagagccggcttgcagttcccagtgggccgtattcatcgacacctaaaatctaggacgaccagtcatggacgtgtgggcgcgactgccgctgtgcacagcgcagccatcctggagtacctcaccgcagaggtacttgaactggcaggaaatgcatcaaaagacttaaaggtaaagcgtattacccctcgtcacttgcaacttgctattcgtggagatgaagaattggattctctcatcaaggctacaattgctggtggtggtgtcattccacacatccacaaatctctgattgggaagaaaggacaacagaagactgtctaaaggatgcctggattccttgttatctcangactctaa

SEQ ID NO: 1593 - DNA, 554 bp, Homo sapiens
aaactttataattactttaatatttttgataactagaaatctagtattgccataaaggaaactaagtgcccatcaaagatttgtttggtataaataaagaattatttgttttgttttcaatgacagtaagctacaaatcatgatgcttaaaaactttctaaagatgaattgtgtggcagtgattggtctgtttgtggagaatgtatgaaagctattaatattctagaatagattaataaattggctatgttgttccaatgaatgtacagcacttccattaacttttgaaagcaacacagccttaaactcaatgcttttgctttatgacatgggaatgttctgtcatcaatggagtgtattcttgtaatagaattctttatatcgttctcaattctatagactttcaagcctatgtatgaatatgaaggggtttttttttttgctttgttttctttttagattttgtacattccatctttataggtccgtttcatatgttttatgtatagaacactaagtcttgcactctctgacattgatactgatatattctc

SEQ ID NO: 1594 - DNA, 518 bp, Homo sapiens
cctgctgggagaagagaacatgaatgggaagctacagaagtattgaaggacagaagaacaggaaaatgggcaggagaggaaaggaaaggaaaggaagagaaggtctgaacttagcaaggtaaattaaggtccacggttcctgagggactgaacgcacagagccgagaacgtcccggagatggggtaccacgaagggtgtattctcatgcacaaccgcagctcggaatttcagcccacacacatcccaccttgaaactctgtgttatcaaggcccctgatggcctccactgcatcctctgcccgctccatgtgtacgaaggcataatctttcacgatgtcacattcgatgaccggaccatactcctcaaacttggctcgaagctccttattggtgcaggtgggactgatgttgcccacatgcaactttgttgaggttttgctcttattcttgctggcttccacgttgatgttcaccccatgaagcttgtaatggtgcaggttgcgtatggcatcctcag

SEQ ID NO: 1595 - DNA, 500 bp, Homo sapiens
ccagtaaaatactattgcctcatattgtcctctgcaagcttcttgctgatcagagttcctcctacttacaacccagggtgtgaacatgttctccattttcaagctggaagaagtgagcagtgttggagtgaggacctgtaaggcaggcccattcagagctatggtgcttgctggtgcctgccaccttcaagttctggacctgggcatgacatcctttcttttaatgatgccatggcaacttagagattgcatttttattaaagcatttcctaccagcaaagcaaatgttgggaaagtatttactttttcggtttcaaagtgatagaaaagtgtggcttgggcattgaaagaggtaaaattctctagatttattagtcctaattcaatcctacttttcgaacaccaaaaatgatgcacatcaatgtattttatcttattttctcaatctcctctctctttcctccacccataataagagaatgttcctactcacacttcag

SEQ ID NO: 1596 - DNA, 234 bp, Homo sapiens
ccatccgcttcctgaatgctgagaatgcacagaaattcaaaacaaagtttgaagaatgcaggaaagagatcgaagagagagaaaagaaaggatcaggcaaaaacaatcatgccgaaaaagtggcagaaaagcttgaaggtctctcagtgaaggaggagaccaaggaggatgctgaggagaaacaataaatcgtcttattttatttccttttcctctctttcctttccttttttt

SEQ ID NO: 1597 - DNA, 419 bp, Homo sapiens
ccaaccttcctgtgcccagcctgcagacaggtggcctctggtggttccaggatctcacggtatccgatcccatctacatattaccactggcagtcactgctacaatgtgggctgttcttgagctaggtgctgagacaggtgtgcaaagttctgaccttcagtggatgagaaatgtcatcagaatgatgcccctgataaccttgcccataaccatgcatttccccacggcagtgtttatgtactggctctcctccaatttgttttccctggtccaagtatcctgtctccggattccagcagtacgcactgtacttaaaatcccccagcgtgttgtacatgacctggacaaattacctccacgggaaggcttcctagagagcttcaaaaaaggctggaaaaatgctgaaatgacgcgtcag

SEQ ID NO: 1598 - DNA, 291 bp, Homo sapiens
ccaattgatttgatggtaagggagggatcgttgacctcgtctgttatgtaaaggatgcgtagggatgggagggcgatgaggactaggatgatggcgggcaggatagttcagacggtttctatttcctgagcgtctgagatgttagtattagttagttttgttgtgagtgttaggaaaagggcatacaggactaggaagcagataaggaaaatgattatgagggcgtgatcatgaaaggtgataagctcttctatgataggggaagtagcgtcttgtagacctacttgcgct

SEQ ID NO: 1599 - DNA, 290 bp, Homo sapiens
aaacctttttggcttaaacagaattttagcatcagaactagctttctgggattggaggcaaaccatcaaggtggtccctctccagtctggacacgatgccagcaaggatgacgtcctgccacctcctggagttaccctggcctcctagggtccctttttctgatgaagtcttaattccctaaaagcgcctctttggacactgaggccctctctgcctttcctggcctccggcaacagttttttacaaagattttttgcagtcgagtccatatgtccacccattgattttt

SEQ ID NO: 1600 - DNA, 294 bp, Homo sapiens
attaagttcaatgtatgggacacagccggccaggagaaattcggtggactgagagatggctattatatccaagcccagtgtgccatcataatgtctgatgtaacatcgagagttacttacaagaatgtgcctaactggcatagagatctggtacgagtgtgtgaaaacatccccattgtgttgtgtggcaacaaagtggatattaaggacaggaaagtgaaggcgaaatccattgtcttccaccgaaagaagaatcttcagtactacgacatttctgccaaaagtaactacaac

SEQ ID NO: 1601 - DNA, 435 bp, Homo sapiens
  misc_feature 171, 180, 197, 215, 376, 404, 420: n = A,T,C or G
ttttttttttttttttttgtttttttttttttaattcttcagctaaaacagcggaagaggtgatttattatatggttgttacactcggccacaaataaacacagaaatagtccagaatgtcacaggtccagggcagaggaccaacatgggcattttgtttatgagcaaggngggtctcanaggtgatcggcgatcanagggcgatgaagttctanatccattgagacaagctctagacagtagcatgcagtcccacaacttgtaccagcatccccagcgtctggcattccatgtttctgctcctgtggcctccacggtgcaacaagctagcggtttacttggacctctgcctcatctttcttcttttgcgcttcancctgcgcattcgcttcttcctccacttngctctcatggcggcanaggtttccaaaaaaa

SEQ ID NO: 1602 - DNA, 319 bp, Homo sapiens
gacgctctcagctctcggcgcacggcccagcttccttcaaaatgtctactgttcacgaaatcctgtgcaagctcagcttggagggtgatcactctacacccccaagtgcatatgggtctgtcaaagcctatactaactttgatgctgagcgggatgctttgaacattgaaacagccatcaagaccaaaggtgtggatgaggtcaccattgtcaacattttgaccaaccgcagcaatgcacagagacaggatattgccttcgcctaccagagaaggaccaaaaaggaacttgcatcagcactgaagtcagccttatctgg

SEQ ID NO: 1603 - DNA, 309 bp, Homo sapiens
ctgcctgggcccggaagggctttggttccttctctgggtctgattttctcactgaactccaccgaccaactgccctaagcccccagggcctccagggcccaggttcgagacccaaacccccaaaatccaaaacttctcttgaaaagttcagggaccgtccaggggagatggggaggagatatggagtgagtcacctgctccagaagatgccagcttctctctccagggtgcttagttggctttgcccacccctcactccccagggagctctggggacagcttcctcacacccctgtcccacccacacag

SEQ ID NO: 1604 - DNA, 424 bp, Homo sapiens
ctggataaggacatcaataccttctctatgcgtgtcagggagtggtacgggtatcactttccggagctggtgaagatcatcaacgacaatgccacatactgccgtcttgcccagtttattggaaaccgaagggaactgaatgaggacaagctggagaagctggaggagctgacaatggatggggccaaggctaaggctattctggatgcctcacggtcctccatgggcatggacatatctgccattgacttgataaacatcgagagcttctccagtcgtgtggtgtctttatctgaataccgccagagcctacacacttacctgcgctccaagatgagccaagtagcccccagcctgtcagccctaattggggaagcggtaggtgcacgtctcatcgcacatgctggcagcctcaccaacctgg

SEQ ID NO: 1605 - DNA, 484 bp, Homo sapiens
  misc_feature 430: n = A,T,C or G
ctggatgtgagagacaacatggtgaaacttaatgatggctctcaaataacctatgaaaagtgcttgattgcaacaggaggtactccaagaagtctgtctgccattgatagggctggagcagaggtgaagagtagaacaacgcttttcagaaagattggagactttagaagcttggagaagatttcacgggaagtcaaatcaattacgattatcggtgggggcttccttggtagcgaactggcctgtgctcttggcagaaaggctcgagccttgggcacagaagtgattcaactcttccccgagaaaggaaatatgggaaagatcctccccgaatacctcagcaactggaccatggaaaaagtcagacgagagggggttaaggtgatgcccaatgctattgtgcaatccgttggagtcagcagtggcaagntacttatcaagctgaaagacggcaggaaggtagaaactgaccacatagtggcag

SEQ ID NO: 1606 - DNA, 273 bp, Homo sapiens
ctgtgatgtcttggagaaacagtgtaaaccggcagtgtaaagaagagcagggcatgtatgagtagttgagaacggtgaacgggagtatgactaacagatgaggatgaaatttgggcttcactgaagtaatgggggctgtctgtgaagccttgtggcagtgcagcccaggtaatttgttgagcctaatgggtgtcagggtcagtctaagtgaaggcaaagagaggctgggatgaagggtgcaaagcaatagtaaagaaagcatgtctgagatcc

SEQ ID NO: 1607 - DNA, 400 bp, Homo sapiens
cacaaagccagggccaggctccccatccctacctcccactgcatcagcagtgggtgttcctgcccttcctgagtctaggcagctctgctgctgtgatctgcacaccctccaacctaggcagggactggggggatgcagtgtgtgttagtgcccatgtggcattgtggcactgttgccccccatggcggcatgggcaagatgaccttccattagcttcaagtcttgttctcttgtctgtggtctgtttaatatgtgggtcactagggtatttattctttctcccatccttacactctggatcattgtgcagacttaatcagggttttaacgctttcattttttttttttttgagctcaaagagagttctcattttccctattcaaactaatacccatgccg

SEQ ID NO: 1608 - DNA, 279 bp, Homo sapiens; identical to SEQ ID NO: 1082

SEQ ID NO: 1609 - DNA, 368 bp, Homo sapiens
gttttatttcaataggtaaaacgtgcagtcctatgtaatcgtcagaaggtaatcttaattatagcttgggtgtgctttaaactgcaagctggcagtggagggcacgattcctctgatttcagctttctccttatacttttctggagctgtgagctgcaagttaactcagtgggattaaagtgtagactggaggtacaaaaggtgaggagtgaggagatagggtagttcttccttggctggctggcttcataatccctgggccccgcagataattaaatcgactttttctgtctcaggcatttgtatgacctctttggaggttccctgctgggtagttatccttgtatctgatggacccatctcaattt

SEQ ID NO: 1610 - DNA, 207 bp, Homo sapiens
ccatgctggtctcgaactcctgaccacatgtggtccacccaccttggcctcaattatgtgcattttggtatatttacttgtatttcaacatcttgtgagtttgaaaaacctgaaaggccagaatgcttccttttatttctcaccatttgggcagcacctaagtggttttgtaaaatgcagcatctggtgctgtgggtctctctcagg

SEQ ID NO: 1611 - DNA, 460 bp, Homo sapiens
  misc_feature 427: n = A,T,C or G
cctgacattcctgccttcttatattaataagacaaataaaacaaaatagtgttgaagtgttggggcagcgaaaatttttggggggtggtatggagagataatgggcgatgtttctcagggctgcttcaagcgggattaggggcggcgtgggagcctagagtgggagagattaagctgaagggaggtcttgtggtaaggggtgatatcatggggatgttagaagaaacatttgtcgtatagaatgattggtgatggcctggatacggttttggatgatttgagaagctaaatggaagatacaaggtccgaataaaaggaggagaaaaatgggtattaaatgtctaagaattgggaggacctaggacatctgattagagagtgcctaaggagattcagcatagtcctgccagcaaagattatttacttnaagagttaagagtggcagtttggggatagcacc

SEQ ID NO: 1612 - DNA, 133 bp, Homo sapiens
aaaatgtgaaccttcaggtattgagtaacacctttatcttggtatagaactgatacttttttttgattttgaaatatctgataataatttggaatgaagtaaggttctgttaaaatatatttgaagacccttt

SEQ ID NO: 1613 - DNA, 524 bp, Homo sapiens
cctagcagagaatcaccaaatttatggagagttaacaggggtttaacaggaaggaagtgcctttagtaagttctcaagccagaggctggaggcagcagctaaatcagaggacagcatcctcagtgaaagtgagccattcggggtggcatgtcactccaggaataaacacaacttagaaacaaatgatttcgtaggatagcacagtgacatggtgcactgtgaacctgaggccactgtgtcaaactgtgcactggttgtgaatagggagagccaaaaattatgtcctactggtaatgagctttcaatggctcgatcctctcacactgaagctctgtagagcagctcagagccacaaccactcccaacattgacccttctgggggtagctgtctgtggcagcccacaggaaggagctggagatccccattaggactgtccacccacacttgaagccacaaaactgcagggattggggctctcactggtttggtcgcctaactcccgcctaaaaggccacaaatttc

SEQ ID NO: 1614 - DNA, 410 bp, Homo sapiens
  misc_feature 381, 391: n = A,T,C or G
ctggataaggacatcaataccttctctatgcgtgtcagggagtggtacgggtatcactttccggagctggtgaagatcatcaacgacaatgccacatactgccgtcttgcccagtttattggaaaccgaagggaactgaatgaggacaagctggagaagctggaggagctgacaatggatggggccaaggctaaggctattctggatgcctcacggtcctccatgggcatggacatatctgccattgacttgataaacatcgagagcttctccagtcgtgtggtgtctttatctgaataccgccagagcctacacacttacctgcgctccaagatgagccaagtagcccccagcctgtcagccctaattggggaagcggtnggtgcacgtnttatcgcacatgctggcag

SEQ ID NO: 1615 - DNA, 107 bp, Homo sapiens
ctgttgtgaaaagatgaagcaaaggaggcaagaaaatgcttaatttagcagacaagagaatggacagtgtgatccttgtttgtgctagccattgggtgatgcaccac

SEQ ID NO: 1616 - DNA, 457 bp, Homo sapiens
  misc_feature 6, 129, 133, 221, 255, 346, 389: n = A,T,C or G
aaattnttgtttaactttttttttttttgagacagagtctcactctgttgcctaggctggaggacagtggcacaatcatggctgattgcagccttgacctccttgactcaattgatcctcccatctcancctnccaagtagctagggctacagacatgtgcaaccatgtttggctaatttttttaatgtttttttgtagagatgaggtcttattatattgnccaggctggtcttgaattcctgggctcaagcttnccaagtagctgcaacaacaggcacacaccaccatgctcaactaattttatttctattttttgtatagacaggggcttgctatagtgtccangctggtctgaaacccttgagctcaagtgatcttcccacaccancctcccaaaatactgggattacaggcttgagcctccatgcctggcccaggtaacatgtttattgagct

SEQ ID NO: 1617 - DNA, 327 bp, Homo sapiens
aaacattagaaagtgggaaaaaaaattccattttcttgtcattataagccaaaacaaaatctagtgtaagtcaaggaaactcattcacacttcaggtccttctcctccaggaaccagcattgttatattatttccatttagcaaaatctgatctaatttagtaatccttcttccttctggtgtgatttcaaactcagtgacatcttccagtaccatattgacaaagtcatcaaatcctagaagagtaccaacaatttccttatcactcttcatcacgatgtgaattcttgatcctatacatttgtccacaagctctaacggcagcag

SEQ ID NO: 1618 - DNA, 167 bp, Homo sapiens
ctgagccaggccgaaggacctccatgcactggctcgggggcctctctcgggacactcagcactttctctagcgtcctccatctcactgggcagaggacagcccggaagcctttttcactttttcaaagtaaactgctatcttaagacacaaaaacatacttgtgggg

SEQ ID NO: 1619 - DNA, 498 bp, Homo sapiens
  misc_feature 480: n = A,T,C or G
ccaggcacgatctcggctcatggcaacctctgcctcccgggttcaagcgattctcctgtctcagcctcccgagtagctgggactacaggcgcccaccaccacacccagctaaattttgtatttttagtagagatggggtttcaccatattggtcaggctggtctcgaactcctgatctcaggtgatccgcccaccttggcctcccaaagtgctgggatgacaggcgtaagccaccaagcccagcgaagactgcatttcaaaattgctctacaattaaagaaatgcactgatagtcttaaaaaatgaagttgggggaaacccagtgtgcctaaaagtaccatctatactgctgacaccatgtcctgttccattttactagtttttattggcgcacactggcaatttagtcccagtcagttaccaccaaattagtatttcttggtatattatctttttttttcttttttttttttttctganacacagtcttgcacctgc

SEQ ID NO: 1620 - DNA, 305 bp, Homo sapiens
  misc_feature 192: n = A,T,C or G
cctgctagaatcactgccgctgtgctttcgtggaaatgacagttccttgttttttttgtttctgtttttgttttacattagtcattggaccacagccattcaggaactaccccctgccccacaaagaaatgaacagttgtagggagacccagcagcacctttcctccacacaccttcattttgaagttcggntttttgtgttaagttaatctgtacattctgtttgccattgttacttgtactatacatctgtatatagtgtacggcaaaagagtattaatccactatctctagtgcttgacttt

SEQ ID NO: 1621 - DNA, 354 bp, Homo sapiens
ccacccgttctgctggcctggatctccccactctaggggtcaggctccattaggatttgccccttcccatctcttcctacccaaccactcaaattaatctttctttacctgagaccagttgggagcactggagtgcagggaggagaggggaagggccagtctgggctgccgggttctagtctcctttgcactgagggccacactattaccatgagaagagggcctgtgggagcctgcaaactcactgctcaagaagacatggagactcctgccctgttgtgtatagatgcaagatatttatatatatttttggttgtcaatattaaatacagacactaagttatagcaaaaaaa

SEQ ID NO: 1622 - DNA, 498 bp, Homo sapiens
ttgccttgcactgtggttaccataaaataactctcattggcatccaagctttataaaaacatcttcattttgctcaaaaagggcagtcaatagatacagagaagccaaactgaacagcctcaataaaataaaattaacaccagcagcgaatcctcttgctgaagacttcggctagagggcacgtgcaccaaagttctaggctgttaaggggccacccacacaccgtcctcgccttgaacacaccagcttggaaatcagttatggattttaatggccttttcaaggtaagtgtagcgactcctctttggggctttgttgaagtggtcgagccctagccaaggccgaggatgagacatattaccgggctgtggctcaaagtctttcaaatttacttcatactcgtcttcatttatgtactggtgtcggcccatcattacaattgcaaatttaaacttctcaaactccttctcctggatgtccagcaggctctggattcgc

SEQ ID NO: 1623 - DNA, 197 bp, Homo sapiens
ccaaggaccgcaagagccgcaagaagcctgtggaggtgaagaagggcaaagaccccaatgcccccaagaggcccatgtctgcatacatgctgtggctcaatgccagccgagagaagatcaagtcagaccatcctggcatcagcatcacggatctttccaagaaggcaggcgagatctggaagggaatgtccaaagag

SEQ ID NO: 1624 - DNA, 489 bp, Homo sapiens
aaaaaaaggcccccagggcaagttatttacagtttaattgccactgtcaactgatctggaccttgatcgggaccgggacctctggcgatccacagatgctggagacttagatctacttgaagaaccacgtttctggctcttctcaggcacgggagacctactaacagaacgggacttgctccggctccggctcctgctcctgcttcttgaccggctgtaagatttgcgactacgggaacgggatcggctacgagacctagaggaacttctggtccgggatcgagacctgcttcttgacctactgtgccttttgctgccttcaattaattttatttttctcccatttatttcctttccagaaagtttttcaatagcattctttaagtcaccataagaggcaaactcaaccaccccttcatttaatttaggtcggtgtgcatccgcaaacgttacttccccagcttgtctcatgaaatctttgagatcctt

SEQ ID NO: 1625 - DNA, 129 bp, Homo sapiens
aaaaaacacgtttgttattaccaaaaagagacgtctttaggtaaaaataataaaaaccccatgctgcatagataatgcagatagttctatttatctggtcaacgggcaaaaagcaagcactttaggtct

SEQ ID NO: 1626 - DNA, 434 bp, Homo sapiens
aaagaaatggtgctttgctctgtgtttgtgctcctgatttccctggaggttctggatgaaggctgaacacaggcttgttaatgtcagtctgtgctgaggacctcagggacttgaggttgcatttttgagcatggggtgcaggagcctttctggatttggatgtggctatggaaagaacacagaagccaaggtcatgtgcatgaaatgaggagtttgagttagtcacctcggggattttttccattttgcagtaaaatgttaaattaatgtagcctgcctctatttgttgggcaggtaatttcaaagggttatttgcctcatctcctatctttagtgaaatcttatgtgtaattgtgtgtatttattccaccgtgggaacagagaatacctgtttagtgttgcactttagactggtgtctgttttgttaatgcag

SEQ ID NO: 1627 - DNA, 432 bp, Homo sapiens
ccaccctcagggttcaaagagactggcccaggggtacacaattgctggaatattctctgcgagtcatgcacacgtgcgggggtgaggtgcagttatatggtgacacacacagtgttactgtgagctctcagggtgcacagagggcaggtgacaagggcatcagctaatctgtcccacctggtccagcccatccagttcaggggcatcaagggggctgaggccccggtagccactgtagaccctgtgactatcactgacaccgtcactgggctccattgggcaaatgtagtccgtcgattcatcgaacttcttttttcttatgtttccgaagtgtgaaaatcctagtttccttggccggactttggctgtggtggtcagtggtgtgtaagctggtgaggccattttctctcgcttttcctgttcagcctccgg

SEQ ID NO: 1628 - DNA, 421 bp, Homo sapiens
ccaattgaaacaaacagttctgagaccgttcttccaccactgattaagagtggggtggcaggtattagggataatattcatttagccttctgagctttctgggcagacttggtgaccttgccagctccagcagccttcttgtccactgctttgatgacacccaccgcaactgtctgtctcatatcacgaacagcaaagcgacccaaaggtggatagtctgagaagctctcaacacacatgggcttgccaggaaccatatcaacaatggcagcatcaccagacttcaagaatttagggccatcttccagctttttaccagaacggcgatcaatcttttccttcagctcagcaaacttgcatgcaatgtgagccgtgtggcaatccaatacaggggcatagccggcgcttatttggcctggat

SEQ ID NO: 1629 - DNA, 462 bp, Homo sapiens
aggatctttgatagttgagaaaattatgcaaagttcctcagaagttggttatgatgctatggctggagattttgtgaatatggtggaaaaaggaatcattgacccaacaaaggttgtgagaactgctttattggatgctgctggtgtggcctctctgttaactacagcagaagttgtagtcacagaaattcctaaagaagagaaggaccctggaatgggtgcaatgggtggaatgggaggtggtatgggaggtggcatgttctaactcctagactagtgctttacctttattaatgaactgtgacaggaagcccaaggcagtgttcctcaccaataacttcagagaagtcagttggagaaaatgaagaaaaggctggctgaaaatcactataaccatcagttactggtttcagttgacaaaatatataatggtttactgctgtcattggccatgcctacaga

SEQ ID NO: 1630 - DNA, 220 bp, Homo sapiens
ccttgccggcatcctccttgcctctgtaccttctcttcccatgtgtgaacgggatgtaccggtacttaatcatgtgcttgatttgcctcttcatcgtgatacagaagagcatgatgaagtacatcaccagaatcggccagaacaccgggacgttgaaagcgtcgaagaaagtacagaccatagccacaaggatgcccttggtagccgcatgccaaaattt

SEQ ID NO: 1631 - DNA, 504 bp, Homo sapiens
ccatccccttatgagcgggcgcagtgattataggctttcgctctaagattaaaaatgccctagcccacttcttaccacaaggcacacctacaccccttatccccatactagttattatcgaaaccatcagcctactcattcaaccaatagccctggccgtacgcctaaccgctaacattactgcaggccacctactcatgcacctaattggaagcaccaccctagcaatatcaaccattaaccttccctctacacttatcatcttcacaattctaattctactgactatcctagaaatcgctgtcgctttaatccaagcctacgttttcacacttctagtaagcctctacctgcacgacaacacataatgacccaccaatcacatgcctatcatatagtaaaacccagcccatgacccctaacaggggccctctcagccctcctaatgacctccggcctagccatgtgatttcacttccactccataacgctcctcatactagg

SEQ ID NO: 1632 - DNA, 411 bp, Homo sapiens
  misc_feature 315: n = A,T,C or G
cacggtggctcacgcctgtaatctcagcactttggaaggccggggcaggcggatcacgaggtcagaagatcgagaccatcctggctaacacagtgaagccccgtctctactaaaaatataaagaattagtcgggcatggtggcgggcgcctgtagtcccagctactcgggagactgaggcagaagaatggcgtgaactcaggaggcggagcttgcagtgagccaaggcgacagagcaagactctgtctcaaaaaataaaaaatagtgcactgtccttcgagaaagttttctaacatctagtaatttgtaacttanaagtggagttgccttgtggatgtcttttttgcattctgtaggaaatgaaacgtgaatttaactcgggttgcaagaaataaaaatgtcagtgcattt

SEQ ID NO: 1633 - DNA, 403 bp, Homo sapiens
  misc_feature 181, 375: n = A,T,C or G
cctgctggagaacagtggtcagatctgctggctcacttggggaacacagtgaccacttcataaccctcaggtggtgtgactcgctcccgggcatgcttctcacagtagatttgatcctccacaaagaaatggcccttctgtttcaggttggtgccacagtcagtgcacacataacactcanggtggcggtgacggtcccgcagcttcacaaacacaccaacaatcccagtgccacatttgtcacacataggcaacttctgagcatttccaatcgacgcagccactttagtgacaggagctttaacacttctgaatcctgagggcttgttgggatcccctttttcttcagactccaggatttcctgcaaaaccaanaaagacgtggactgtttcgggggctcat

SEQ ID NO: 1634 - DNA, 309 bp, Homo sapiens; identical to SEQ ID NO: 1153

SEQ ID NO: 1635 - DNA, 414 bp, Homo sapiens
  misc_feature 401: n = A,T,C or G
gtgtgtgtgtgtgtgtgtacgtgtgctgtgtgtgcatgtgctgtgtgcatgtgtgtgctgtgtttgtgtgtgtgctgtgtgtgctgtgttcgtgtgtgctgtgttcgcgtgtgtgtgctgtgtgtgcatgtgtgtgctgtgtctttgtgtgtgtgctgtgtgctagtgtgctgtgtgtgcatgtgtgtgcgtgtgctgtgcgtttgtgtgctgtgtgctcgtgtgtgtgctgtgttcatgcgtgtgctgtgtgttgtgtgtgtgtagctgcggggatgcataaagtatgagtgctttttaggatgggaattgggatgtaagatttgggggtgagggtcgtgccaattacatttcatttgcatggattttggttttcatgctctgtcctgcacatcactcangatttcaatggtg

SEQ ID NO: 1636 - DNA, 64 bp, Homo sapiens
aaaggaagccagcaccatagcagagtacataagtggctatcagagaagccagccgatatggatt

SEQ ID NO: 1637 - DNA, 514 bp, Homo sapiens
ccagagcacgtgaggatctgcaaaaaatgaaacaatttgctcaggattttgtgatgcacacagatgtcagaacctgctcgtcatctactagtgtcattgcggacctccaggaggatgaggatggtgtttatttcagctcatacgggcattatgggatacatgaagaaatgctaaaggacaaaatacgaacagaaagctaccgagatttcatataccaaaatccacatatcttcaaagacaaggtagttttggatgttgggtgtggaactggaattctctctatgtttgctgctaaagctggggcgaagaaggttcttggagttgatcaatctgaaatactttaccaggcaatggatattataagactaaataaacttgaagatactattacactaattaaaggaaagattgaagaagttcatcttcctgtagaaaaagtagatgttatcatatctgagtggatgggctattttcttctgtttgagtctatgttagattctgtcctttatgcaaa

SEQ ID NO: 1638 - DNA, 163 bp, Homo sapiens
cctgtgacaagccacactgtcctccagaacccatcgagctttaggcaaaatgttttaggcatctgactaaggagcccacccgagtatgagtaacagaagccaagatctgagctttctagagggcagggcctctttctagtccccagcctcttcctgtgcttgt

SEQ ID NO: 1639 - DNA, 527 bp, Homo sapiens
  misc_feature 404: n = A,T,C or G
cctactttgaaaacgactgctgggtcaggtacttcctgcacacaggccacctgaccattgcaggctgcaaaatgtcaaagtcactaaaaaacttcatcaccattaaagatgccttgaaaaagcactcagcacggcagttgcggctggccttcctcatgcactcgtggaaggacaccctggactactccagcaacaccatggagtcagcgcttcaatatgagaagttcttgaatgagtttttcttaaatgtgaaagatatccttcgcgctcctgttgacatcactggtcagtttgagaagtggggagaagaagaagcagaactgaataagaacttttatgacaagaagacagcaattcacaaagccctctgtgacaatgttgacacccgcaccgtcatggaaganatgcgggccttggtcagtcagtgcaacctctatatggcagcccggaaagccgtgaggaagaggcccaaccaggctctgctggagaacatcgccctgtacctcacccatatgctgaagatcttt

SEQ ID NO: 1640 - DNA, 270 bp, Homo sapiens
  misc_feature 17, 262: n = A,T,C or G
attaggttttggcacanagcaggcgccctatggaatgcagacacagaattaccccaaaggcggcctcctggacagcatgtgtccggcctccacacccagcgtactcagctctgagcaggagtttcagatgttccccaagtctcggctcagctccgtcagcgtcacctactgctctgtcagtcaggacttcccaggcagcaacttgaatttgctcaccaacaattctgggacgcccaaagaccacgactcccctgagaacggngcggacag

SEQ ID NO: 1641 - DNA, 495 bp, Homo sapiens
ctgatgtattttaatctgtttctgttctatcttgtaattaatttggtgggttctacttgttttaacataaataaagagtatgcagcacgtttaataaaatcagaactcttaattggcttatgcccaggtctaggctgagaagtcctttttcttcttcccacctttatttccttagtttctgtccaccttaatcgaaacaacacatggttatgtctttttcctgctacaactacagggtacttgagcctttcccctcaagtgcattcgaagtcacccaggatgatcctcactagtagcctgctttggcagtgtggctttttgcacacttgccctgtcttcctgagactacttcagtaagccatgcttccttcttccccacttttatttggtgtcatgaatagaaacttccaaatgtaaccatggaagctaagtttggcctgctttgctttttagtctccacaccatgggcagaactgctgtctttactacttcatc

SEQ ID NO: 1642 - DNA, 504 bp, Homo sapiens
  misc_feature 407, 486: n = A,T,C or G
gcctgagcggggaagcccgcaaacaggtggaggtcttcagacagaatcttttccaggaggctgaggaattcctctacagattcttgccacagaaaatcatatacctgaatcagctcttgcaagaggacttcctcaatgtggctgacttgacttccctccgggccccactggacatccccatcccagaccctccacccaaggatgatgagatggaaacagataagcaggagaagaaagaagtccctaagtgtggatttctccctgggaatgagaaagtcctgtccctgcttgccctggttaagccagaagtctggactctcaaagagaaatgcattctggtgattacatggatccaacacctgatccccaagattgaagatggaaatgattttggggtagcaatccangagaaggtgctggagagggtgaatgccgtcaagaccaaagtggaagctttccagacaaccatttccaagtacttctcanaacgtggggatgctgtgg

SEQ ID NO: 1643 - DNA, 372 bp, Homo sapiens
ctgaggaagctcttcattggagggttgagctttgaaacaactgatgagagcctgaggagccattttgagcaatggggaacgctcacggactgtgtggtaatgagagatccaaacaccaagcgctccaggggctttgggtttgtcacatatgccactgtggaggaggtggatgcagctatgaatgcaaggccacacaaggtggatggaagagttgtggaaccaaagagagctgtctccagagaagattctcaaagaccaggtgcccacttaactgtgaaaaagatatttgttggtggcattaaagaagacactgaagaacatcacctaagagattattttgaacagtatggaaaaattgaagtgattgaaatc

SEQ ID NO: 1644 - DNA, 462 bp, Homo sapiens
ctggagctgacttttttggattttctcatccagccatccacaacctgatccagagctgtccaggagctcgaaaatgcatcaattaccagtgggtgaaatttgatgtgtgcaaacctggagatgggcagctacctgaggggctgccggagaatgatgcagctatgagctttgaagcctttcagagacagatctttgatgaagatcagaatgatccccttctgccaggatccttggacctcccagagcttcagcctgcagcctttgcgtcttcttaccagcccatgtacctgacacatgaacccttggtagatactcacctgcagcacttgaagtctccatcacagggtagcccaattcagtcttcagattgaacaagaagggatcagatgccacatcgtttttgtcgtgattaatttaacttaaactaaaattttgggtatatgaaagaaggcagcaattcag

SEQ ID NO: 1645 - DNA, 479 bp, Homo sapiens
ccagggtctggaagggccctgggagcgcccaccccctctggatgagtccgagagagatggaggctctgaggaccaagtggaagacccagcactaagtgagcctggggaggaacctcagcgcccttccccctctgagcctggcacataggcacccagcctgcatctcccaggaggaagtggaggggacatcgctgttccccagaaacccactctatcctcaccctgttttgtgcttttcccctcgcctgctagggctgcggcttctgacttctagaagactaaggctggtctgtgtttgcttgtttgcccacctttggctgatacccagagaacctgggcacttgctgcctgatgcccacccctgccagtcattcctccattcacccagcgggaggtgggatgtgagacagcccacattggaaaatccagaaaaccgggaacagggatttgcccttcacaattctactccccagatcctc

SEQ ID NO: 1646 - DNA, 234 bp, Homo sapiens; identical to SEQ ID NO: 302

SEQ ID NO: 1647 - DNA, 457 bp, Homo sapiens
  misc_feature 421, 444: n = A,T,C or G
cctggaaggaggggggcaggagacagcccagaagcagttctgcaaggaggtttagcaggggtggcgcggagatttgatccttggaagaaatcctatgctgctgggagttgagattcctgagaattagagagaaaagaactttgggtgcccttaggtaaattatgtaaacacactgagctgtcttgggtgcccaggatttggaaatggggcctgggggcagtaggagctggtgctccagaagtcatatttgcgggaggttgtggggatggaaagggtgggtaagccctgaccctgagggtctcacatgactttcagcacatggagcctccatggggactttggcttcaaagccatcaagctcaagagtgtgggcaagtgtggagacagaggtgactctccccagtggatgctgaagaacttnaaaggtgactctgtgggccgggnacatccggcacag

SEQ ID NO: 1648 - DNA, 566 bp, Homo sapiens
  misc_feature 208, 542: n = A,T,C or G
aaagcaagaaacagaatgcgagtaatcagaaagcactagcaggcatcagttaatccaagatactagctcttagttccaaaagcacttgcaaagaaaaccttttggggggaaggggtggagagggatggaagcactccataataactggaatcccatgagtgtgtatgccaagtctcatgaggctattttttgaatttatcctttactnggtcatggttttttccctcaaatacaatttttctttgactttttttcctcaaagtataaaaagtatgaaatataaacaagctcttgcactgcacacttagaagtgtacaattcaagcattatagagctatctacacactgataaatcccatcgaatcttggataattcattaatatacaaaatatcagggcacagaaagaactaaaacccacttctttttgttacacataagattcaaatattcaatctaaagaaaaacacaatcactttcgctctcttctacatctgcatggtgatacacttattaaaatattcctgtataatcatgtttggngttactatttcaagtcaggtttac

SEQ ID NO: 1649 - DNA, 306 bp, Homo sapiens
  misc_feature 113, 122, 129, 149: n = A,T,C or G
ggctggtctcgaactgtcttcaagtgatccacccacctcggcctctcaaagtgctgggattacagtcgtgagccaccgcgcctggctatgtgaagattttgaggcacgctgancctacacangcaggtngcgggtgcagcactccagcncttctctgacattaggttacactcaacttctctggcacctctcctgtgcagccaactgaatgttttgaggtttctcctttcttattcttcctttgaaagaacccaaacagctcatcttctggtataaatttgaaaacatttttgctgaatattatat

SEQ ID NO: 1650 - DNA, 397 bp, Homo sapiens
aaaaagaaaagttgaattatggtttccagagctttaggagtccatcttcactgtaggtagcaatcaggttctgatgagggtgatgtgcaataccaatcacatccttctcgtgcactgtcaaagttctctccagtttgccagtgactgtactgaaacagtagagcacaaagccctcccctacacagtagatccattcaccacggggagagagggcacagcaaacaaagtccccaccttctcttttaccagaactgaagcttctgacaatctgcccctgcatgttcatgatgaccaccgtgtttgatctgttgcacaccacaaagtgctcagggtttttaggaagtagaatcacactgttgacggtaatatctgtccctgcggtgctgcccagggattt

SEQ ID NO: 1651 - DNA, 506 bp, Homo sapiens
ctgggcttccatcaatagttcattcacttctggactaacaccatggagggggatacaacttcgtccagttgagaagggggagtgcaaatatgaggttctgttgtcccagtcatcaggcaaagaaaatgatgttgtgccaggaggttgagataccttgtttgtgtctgacacctgtcctgctgaggcttgccatctgctatataacagtcctgagcccactcgatcttgcacaaatttaagattccctgacgaaagcagttgctgggctctgtgctgccagttcacggttctttcaatcatatatcgaagtgcatctccctcaggaaggcgaactcggatacgctgaagggaggcgagcaggggcagaattttctctaatggaggtttctctgacctccgacaatggggacaaagccagattcgcaggccctgtgaaatactgggtaccgccacacaactggtgtggaaagcatccctgcagagttcacattgaatcataggggcag

SEQ ID NO: 1652 - DNA, 265 bp, Homo sapiens
caccattatgcagaatccacgccagtacaagatcccagactggttcttgaacagacagaaggatgtaaaggatggaaaatacagccaggtcctagccaatggtctggacaacaagctccgtgaagacctggagcgactgaagaagattcgggcccatagagggctgcgtcacttctggggccttcgtgtccgaggccagcacaccaagaccactggccgccgtggccgcaccgtgggtgtgtccaagaagaaataagtctgtagg

SEQ ID NO: 1653 - DNA, 364 bp, Homo sapiens
cttagcggctgctgttggttgggggccgtcccgctcctaaggcaggaagatggtggccgcaaagaagacgaaaaagtcgctggagtcgatcaactctaggctccaactcgttatgaaaagtgggaagtacgtcctggggtacaagcagactctgaagatgatcagacaaggcaaagcgaaattggtcattctcgctaacaactgcccagctttgaggaaatctgaaatagagtactatgctatgttggctaaaactggtgtccatcactacagtggcaataatattgaactgggcacagcatgcggaaaatactacagagtgtgcacactggctatcattgatccaggtgactctgacatcatt

SEQ ID NO: 1654 - DNA, 454 bp, Homo sapiens
ccagatccattttcagtggtctggatttctttttattttcttttcaacttgaaagaaactggacattaggccactatgtgttgttactgccactagtgttcaagtgcctcttgttttcccagagatttcctgggtctgccagaggcccagacaggctcactcaagctctttaactgaaaagcaacaagccactccaggacaaggttcaaaatggttacaacagcctctacctgtcgccccagggagaaaggggtagtgatacaagtctcatagccagagatggttttccactccttctagatattcccaaaaagaggctgagacaggaggttattttcaattttattttggaattaaatacttttttccctttattactgttgtagtccctcacttggatatacctctgttttcacgatagaaataagggaggtctagagcttctattccttgg

SEQ ID NO: 1655 - DNA, 107 bp, Homo sapiens
aaattatggaagtggaaattacaatgattttggaaattataaccagcaaccttctaactacggtccaatgaagagtggaaactttggtggtagcaggaacatggggg

SEQ ID NO: 1656 - DNA, 451 bp, Homo sapiens
ccatttgtcatcactgggaaccagagacacccatccctacgccagcttgagccgtgcactgcagacacaatgctgtatttcttctcccagtcacctgatgagccagcagtatagaccatatagtttcttcactaaattgactgcagatgagctgtggaaaggcgctttagcagagactggtgctggagcaaaaaaaggaagaggcaaaagaactaaaaagaagaaaagaaaggatctgaacaggggtcagatcattggtgaagggcgttatggttttctatggcccggactgaatgtccctcttatgaaaaatggagcagtgcagaccattgcccaaagaagcaaggaagagcaggagaaggtggaggcagacatgatccagcagagagaagagtgggaccgaaagaagaagatgaaggttaaacgggagcgaggatggagtggaaactca

SEQ ID NO: 1657 - DNA, 501 bp, Homo sapiens
  misc_feature 41, 156, 236, 344, 421: n = A,T,C or G
aaattcttcattttaccagcaactgctgacatcaaagtctnccctcccccaacaacaaaaatacaattaaaaaaaataaataataaagtcatttgtgatcgttgctgtggttctgagctgcaaaggcactttcaaatacagaactacttgtacgtnatcataaaaccaatatacaaaaacaactcaagagtcaataaatataaataaaactatgatctaagactgcatcaccattnggacatctggcagaagtgggagctcaaagaccagggggctgggcaggctcctgggagcctgatccgagaccgtgtcggctgcaaggggacacacaaccagggtactgntgactagctttttgcatagctgtgagatgcggcactcgatttcccagccaaccacagaaactaccattgccagtgtnagccagcttgtcaaaacttaaattaacacagggattctaagtcagcaacggcctcagactcgagtatgacacgacagttt

SEQ ID NO: 1658 - DNA, 456 bp, Homo sapiens
  misc_feature 441: n = A,T,C or G
cctacagacttatttcttcttggacacacccacggtgcggccacggcggccagtggtcttggtgtgctggcctcggacacgaaggccccagaagtgacgcagccctctatgggcccgaatcttcttcagtcgctccaggtcttcacggagcttgttgtccagaccattggctaggacctggctgtattttccatcctttacatccttctgtctgttcaagaaccagtctgggatcttgtactggcgtggattctgcataatggtgatcacacgttccacctcatcctcagtgagttctcccgccctcttggtgaggtcaatgtctgctttcctcaacaccacatgagcatatcttcggcccacacccttaatggcagtgatggcaaaggctattttccgccgcccatcgatgttggtgttgagtactcgcaaaatatgctngaacttttcagggat

SEQ ID NO: 1659 - DNA, 476 bp, Homo sapiens
  misc_feature 10, 13, 16, 31, 50, 61, 106, 276, 366, 400, 413, 433: n = A,T,C or G
aaaccctttnctnctnccattttgacatttncacttggagaacacttganttgtgaaggtnttgggcatccaccccagaaagtgggaatttgattttatccttccnaactggaagaacatttttatgaagaatttttgtctaggagaatataacagtgttacccaaggttgtgtctttaagggtggttcattttctctggccttttgctactcaaagtaaagtactaggagtcctaagaaatgttctgttcttgtacattatactgattaagtcangattaatttgatttcaaagctgagaacagtggtaaaaactcgtttacagaaatgcattttggaagagaaaaatactgtaaaacgtgtcgngaatgtttcttcagtttcttgttcagccaatgangaaagggcattgnctttctttttaccattaatnacttctcaataaacgtgagatcctgttgagcataaaaaaaaaa

SEQ ID NO: 1660 - DNA, 116 bp, Homo sapiens
caggtaaaaaatgactgttcaggagtgttcaagtagggtcagatgaccagtgattgggaatacttcgtaagcaggagcaagtaagatctgagccactgttctatcggtagggtgtc

SEQ ID NO: 1661 - DNA, 386 bp, Homo sapiens
aaagataactcagcatgtttgtaaagcaggatacattttactaaaaggttcattggttccaatcacagctcataggtagagcaaagaaagggtggatggattgaaaagattagcctctgtctcggtggcaggttcccacctcgcaagcaattggaaacaaaacttttggggagttttattttgcattagggtgtgttttatgttaagcaaaacatactttagaaacaaatgaaaaaggcaattgaaaatcccagctatttcacctagatggaatagccaccctgagcagaactttgtgatgcttcattctgtggaattttgtgcttactactgtatagtgcatgtggtgtaggttactctaactggttttgtcgacgtaaacattt

SEQ ID NO: 1662 - DNA, 364 bp, Homo sapiens
ccatatgactcctggggccacctccacgacggcccagccccaccgacgctctgctgaaaatcctgcccctcagcaggacgcaagcttgttccccaaatagtggtgacctcaaactgcaatatgatgaaacctgcagccaacactgccctccacaagggtttctggaaaggctgaagctggagacggtaaaccacaacaccgtcccaggtcactccaggtcaccccagctaaagacattcaacaccagccaaaaggctaaagtttagtttgaagggttcaaaggcaaatacactgaaacccacgtgtaaacctgcctggttttcaaactggaagagaaacactttggtgtcttcaataacccagg

SEQ ID NO: 1663 - DNA, 5265 bp, Homo sapiens
aacaggttgctcgtgggggccccgcgggcagaagcgcttccactgcagagagccaacagaacgggagggctgtacagctgcgacatcaccgcccgggggccatgcacgcggatcgagtttgataacgatgctgaccccacgtcagaaagcaaggaagatcagtggatgggggtcaccgtccagagccaaggtccagggggcaaggtcgtgacatgtgctcaccgatatgaaaaaaggcagcatgttaatacgaagcaggaatcccgagacatctttgggcggtgttatgtcctgagtcagaatctcaggattgaagacgatatggatgggggagattggagcttttgtgatgggcgattgagaggccatgagaaatttggctcttgccagcaaggtgtagcagctacttttactaaagactttcattacattgtatttggagccccgggtacttataactggaaagggattgttcgtgtagagcaaaagaataacactttttttgacatgaacatctttgaagatgggccttatgaagttggtggagagactgagcatgatgaaagtctcgttcctgttcctgctaacagttacttaggtttttctttggactcagggaaaggtattgtttctaaagatgagatcacttttgtatctggtgctcccagagccaatcacagtggagccgtggttttgctgaagagagacatgaagtctgcacatctcctccctgagcacatattcgatggagaaggtctggcctcttcatttggctatgatgtggcggtggtggacctcaacaaggatgggtggcaagatatagttattggagccccacagtattttgatagagatggagaagttggaggtgcagtgtatgtctacatgaaccagcaaggcagatggaataatgtgaagccaattcgtcttaatggaaccaaagattctatgtttggcattgcagtaaaggatatgggagatattaatcaagatggctacccagatattgcagttggagctccgtatgatgacttgggaaaggtttttatctatcatggatctgcaaatggaataaataccaaaccaacacaggttctcaagggtatatcaccttattttggatattcaattgctggaaacatggaccttgatcgaaattcctaccctgatgttgctgttggttccctctcagattcagtaactattttcagatcccggcctgtgattaatattcagaagaccatcacagtgactcctaacagaattgacctccgccagaaaacagcgtgtggggcgcctagtgggatatgcctccaggttaaatcgctgttttgaatatactgctaaccccgctggttataatccttatctagcaattgtgggcacacttgaagctgaaaaagaaagaagaaaatctgggctatcctcaagagttcagtttcgaaaccaaggttctgagcccaaatatactcaagaactaactctgaagaggcagaaacagaaagtgtgcatggaggaaaccctgtggctacaggataatatcagagataaactgcgtcccattcccataactgcctcagtggagatccaagagccaagctctcgtaggcgagtgaattcacttccagaagttcttccaattctgaattcagatgaacccaagacagctcatattgatgttcacttcttaaaagagggatgtggagacgacaatgtatgtaacagcaaccttaaactagaatataaattttgcacccgagaaggaaatcaagacaaattttcttatttaccaattcaaaaaggtgtaccagaactagttctaaaagatcagaaggatattgctttagaaataacagtgacaaacagcccttccaacccaaggaatcccacaaaagatggcgatgacgcccatgaggctaaactgattgcaacgtttccagacactttaacctattctgcatatagagaactgagggctttccctgagaaacagttgagttgtgttgccaaccagaatggctcgcaagctgactgtgagctcggaaatccttttaaaagaaattcaaatgtcactttttatttggttttaagtacaactgaagtcacctttgacaccccagatctggatattaatctgaagttagaaacaacaagcaatcaagataatttggctccaattacagctaaagcaaaagtggttattgaactgcttttatcggtctcgggagttgctaaaccttcccaggtgtattttggaggtacagttgttggcgagcaagctatgaaatctgaagatgaagtgggaagtttaatagagtatgaattcagggtaataaacttaggtaaacctcttacaaacctcggcacagcaaccttgaacattcagtggccaaaagaaattagcaatgggaaatggttgctttatttggtgaaagtagaatccaaaggattggaaaaggtaacttgtgagccacaaaagcgagataaactccctgaacctaacggagtctcacaactcaagaaagaaacgggaaattactgaaaaacagatagatgataacagaaaattttctttatttgctgaaagaaaataccagactcttaactgtagcgtgaacgtgaactgtgtgaacatcagatgcccgctgcgggggctggacagcaaggcgtctcttattttgcgctcgaggttatggaacagcacatttctagaggaatattccaaactgaactacttggacattctcatgcgagccttcattgatgtgactgctgctgccgaaaatatcaggctgccaaatgcaggcactcaggttcgagtgactgtgtttccctcaaagactgtagctcagtattcgggagtaccttggtggatcatcctagtggctattctcgctgggatcttgatgcttgctttattagtgtttatactatggaagtgtggtttcttcaagagaaataagaaagatcattatgatgccacatatcacaaggctgagatccatgctcagccatctgataaagagaggcttacttctgatgcatagtattgatctacttctgtaattgtgtggattctttaaacgctctaggtacgatgacagtgttccccgataccatgctgtaaggatccggaaagaagagcgagagatcaaagatgaaaagtatattgataaccttgaaaaaaaacagtggatcacaaagtggaacgaaaatgaaagctactcatagcgggggcctaaaaaaaaaaagcttcacagtacccaaactgctttttccaactcagaaattcaatttggatttaaaagcctgctcaatccctgaggactgatttcagagtgactacacacagtacgaacctacagttttaactgtggatattgttacgtagcctaaggctcctgttttgcacagccaaatttaaaactgttggaatggatttttctttaactgccgtaatttaactttctgggttgcctttatttttggcgtggctgacttacatcatgtgttggggaagggcctgcccagttgcactcaggtgacatcctccagatagtgtagctgaggaggcacctacactcacctgcactaacagagtggccgtcctaacctgcgggcctgctgcgcgaacgtccatcacgttagctgtcccacatcacaagactatgccattggggtagttgtgtttcaacggaaagtgctgtcttaaactaaatgtgcaatagaaggtgatgttgccatcctaccgtcttttcctgtttcctagctgtgtgaatacctgctcacgtcaaatgcatacaagtttcattctccctttcactaaaacacacaggtgcaacagacttgaatgctagttatacttatttgtatatggtatttattttttcttttctttacaaaccattttgttattgactaacaggccaaagagtctccagtttacccttcaggttggtttaatcaatcagaattagagcatgggaggtcatcactttgacctaaattatttactgcaaaaagaaaatctttataaatgtaccagagagagttgttttaataacttatctataaactataacctctccttcatgacagcctccaccccacaacccaaaaggtttaagaaatagaattataactgtaaagatgtttatttcaggcattggatattttttactttagaagcctgcataatgtttctggatttcatactgtaacattcaggaattcttggagaaaatgggtttattcactgaactctagtgcggtttactcactgctgcaaatactgtatattcaggacttgaaagaaatggtgaatgcctatggtggatccaaactgatccagtataagactactgaatctgctaccaaaacagttaatcagtgagtcgatgttctattttttgttttgtttcctcccctatctgtattcccaaaaattactttggggctaatttaacaagaactttaaattgtgttttaattgtaaaaatggcagggggtggaattattactctatacattcaacagagactgaatagatatgaaagctgattttttttaattaccatgcttcacaatgttaagttatatggggagcaacagcaaacaggtgctaatttgttttggatatagtataagcagtgtctgtgttttgaaagaatagaacacagtttgtagtgccactgttgttttgggggggcttttttcttttcggaaatcttaaaccttaagatactaaggacgttgttttggttgtactttggaattcttagtcacaaaatatattttgtttacaaaaatttctgtaaaacaggttataacagtgtttaaagtctcagtttcttgcttggggaacttgtgtccctaatgtgtttagattgctagattgctaaggagctgatactttgacagtgtttttagacctgtgttactaaaaaaaagatgaatgtcctgaaaagggtgttgggagggtggttcaacaaagaaacaaagatgttatggtgtttagatttatggttgttaaaaatgtcatctcaagtcaagtcactggtctgtttgcatttgatacatttttgtactaactagcattgtaaaattatttcatgattagaaattacctgtggatatttgtataaaagtgtgaaataaattttttataaaagtgttcattgtttcgtaacacagcattgtatatgtgaagcaaactctaaaattataaatgacaacctgaattatctatttcatcaaaccaaagtt

SEQ ID NO: 1664 - DNA, 911 bp, Homo sapiens
ccaaaagaaattagcaatgggaaatggttgctttatttggtgaaagtagaatccaaaggattggaaaaggtaacttgtgagccacaaaaggagataaactccctgaacctaacggagtctcacaactcaagaaagaaacgggaaattactgaaaaacagatagatgataacagaaaattttctttatttgctgaaagaaaataccagactcttaactgtagcgtgaacgtgaactgtgtgaacatcagatgcccgctgcgggggctggacagcaaggcgtctcttattttgcgctcgaggttatggaacagcacatttctagaggaatattccaaactgaactacttggacattctcatgcgagccttcattgatgtgactgctgctgccgaaaatatcaggctgccaaatgcaggcactcaggttcgagtgactgtgtttccctcaaagactgtagctcagattcgggagtaccttggtggatcatcctagtggctattctcgctgggatcttgatgcttgctttattagtgtttatactatggaagtgtggtttcttcaagagaaataagaaagatcattatgatgccacatatcacaaggctgagatccatgctcagccatctgataaagagaggcttacttytgatgcatagtattgatctacttctgtaaktgtgtggattcyttaaacgctctaggtacgatgacagtgttccccgataccatgctgtaaggatccggaaagaagagcgagagatcaaagatgaaaagtatattgataaccttgaaaaaaaacagtggatcacaaagtggaacgaaaatgaaagctactcatagcgggggcctaaaaaaaaaagcttcacagtacccaaactgctttttccaacttagaaattcaatttggattt

SEQ ID NO: 1665 - DNA, 2013 bp, Homo sapiens
tctctctctcctctccacacagagcttagaagcaaagttaagagactcatcagattctgagctgctgcgggatattttgcagaagcacgaggctgtccacacagagcctttggatgagctgtacgaggtgctggtggagaccctgatggccaaggagtccacccagggccaccggagctatttgctgacgtgctgtattgcccagaagccatcgtgtcgctggtcggggtcctgcggaggctggctgcctgccgggagcaccagcgggctcctcaattctacatggcccttaccgtctgcaacccagagatgtgccagctgttcaccaccgagctatgctggactgggatcagatgggaagcggaagctcatcatgaccagaaactgtttccctacagagagcacttggagatggcaaagctgaacctcacactgtaggactcacacatgactccaacgggattgtgagaattaagtcactctcgtgggaagaatttttatatgggaaagcggataaaactttcattggactggaatgtttggagaatgttaaattccaaatcaggaaccacaaactgcgctctaataagacatcggctatctaagcatgtgggttccccctttctgccagcagttctggttcttaagaaaatcaccataaatcagacatgaaaattctggctccaaaaatagcattttcattgtgcaaataaaaacgtgtgtatcaagtatgacattcccccaacgtggacacacttggttcctcacaaagccaagcccgctgcagctgccacatccctggacacactcgtttcctcacaaagccaagcccgctgcagctgccacatccctggacacactcggttcctcacaaagccaagcccgctgcagctgccacatccctggacacactcgtttcctcacaaagccaagcccgctgcagctgccacatccctggacacactcgtttcctcacaaagccaagcccgctgcagctgccacatccctggacacactcggttcctcaaaaagccaagccggctgcagctgccacatccctgggtttatgatgcagcaggtgcttttttcaagacaggaatcaaagtgttaggaacatggcagaaaggtgacacctggagaccaaatgcagggtaaggagtactgcagaggtcacagggaagtcacagaacagtaatacgctagcaggggcatggggcgtgaagaacagaagacaggaagcgtttcagagactccaaagaagaaatcagggccaaccacagcttcccgagtcattcaccaggtggcaccactgccttcatttcagcttccggccactgggaggcgctgctcgaaagggtttgccctgagacaccaagaagaagctgcgggaaggacagcaggggccctggggttttagcctctggcccaggagttatgtgtccataaccaaagggagcacagtctgcacccagctctcatcccatcagagctgctgcgactcccgcaggttcttccagaactggtttagcttgcctgcaggatcaggaaagtttgagaaaagcatctgcaaaatactaaagagcagagcttacttcattgcctgtccccaccccatcccaggtcaccacctggctgaacccaggtccccgacccaacaacaacccctcccaagtccctaactccctcacttggacttgagacccttcacaacccagcagcgctccgcctccaacttgacatcatgctttctggaaacttccccgtgtgtcccactttcccacacttggtgcgctggagcaccttccggcctctacatgctgtacgttcccctgtgagcaccctcctctcagcctctggccaacacagtcccacccatctgtgggtaacaagggggtgtgggtgttcttttcagccttgctaaactgtctgaatcaaggatcacaaactacagcctgcaggccaaatccagcccacagcctgtgtttgtaaataaagctttattggaacaaagcc

SEQ ID NO: 1666 - DNA, 451 bp, Homo sapiens
ctgttcaccaccgagctaggccgggctgggatcatatgggaagcggaagctcatcatgaccagaaactgtttccctatggagagcacttggagatgacaatgctgaacctcacactgtaggactcacacacgactccaacgggattgtgagaatcaagtcaatctcatgggaagaatttttatatgggaaagcggataaaactttcattgtactggaatgtttggagaatgttaaattccaaatcagaaaccacaaactgccctctaataagacatcggctatctaagcgtgtgggtgccccctttctgccagcagttctggttcttacgaaaatcaccatatatcagacatgaaaattctggctttgtgcagataaaaaagtgtgtatcaagtatgacgttcccccaatgtggacacacttggttcctcagaaagccaagcccactgcag

SEQ ID NO: 1667 - DNA, 3149 bp, Homo sapiens
taatgaggaatcaaaggaagaagaagaaagagagaggaaggaaggttggaaggaaggaaggagggaaaattagaaggggaaaccatgattgctggtgaggttttgagcacattttcctgcaggctggtatgggtgagaggtttggtcttgtttgcaaatcttctgaaggccattccagaggagcagttgccactgccccatcccctgagctctgagcatgggggttcccctggggagactcctggtgagaggatgccgatttctgctgatctgtcactgggtaccgaggactgggtgtgtttaaggcagacagccaggtgaggatcccagctactggggcctgctgtcatctcctgggagtacccgggggtcaggagcctaggggactcttgcacttcacatccagccatgctaattacactttttggcaaaggaaacagctaggagcagtttctttcactcctacagccccgttttctcagtgtttagacctcgaattattactgggctagagggaaggcagcctctgaagtgtggcaggaggaggggaagtctgcctgcatcttggtgtgtctgtcagatgccagcactaataacctggcttctgtgaggcctgtcagtgctctcaggaatgaaaggggacccctgagaggtgctcggtaccagcaggctgtgaatgctctctacccaccaccctcacctcctcgttaaagatggtgctatctgccacacagcagacatctggtcgctgcacacccgaaagaccccaaggcagtctgccccttgtccagccacacgccagcacccaccctcctggcccctgcctcggcctccccagaccagctgcacccagcccccaacacgcaccccttctccagatgtgtgcagggcctcattttgcagagcaaagacagatgtttcagccacacgctttattaacttctaaaacctgtgctcaggacactcttcaacagtcatgaaaagtttgatcacttgccacagtcaggacctttgtgtggggctctgatctgatgttcggtctcatcatctcccaaaccagcagtcgtttgtaccccaaccctctgctcaggggctcatacccccaaatgattttcctgatttatgtatttccctacaaagggctttctatacctagcatctgcctccagcatgagaagggggaataggtgagacccatttgccagtagcagacggggaccctggggagaaaatggcagagcctgttggagactccctgtctccagctgaccagccaatgggattcctcttccctccactgtctcccacaaagtagaagaatcctggtacatttagcccatgagcctggcacagatccctatctagacatgaggccctttagacatgactttggcattgaccagcctgttggcaatgggtcggggaggcagaggggatgctcacaccagtaattctcatcccctgaatgcttgggatcacctggggagagttcacaaaaaactggtgcaggggtcccacctctgatgatgctgagtggtgggtctggggtgtggcccaggcatcatgatgtttcaggcccccaggtgacttcttaggcagcccagctaagcccctagagccttgcaatttcccccaaatgacctcagagggcccgatttgagggaaatgcctaacttcaggggccgtaagaatcccccagggagcatgtgaaatgcagataccaggcccacccccagagatgagctgaggtgggtcaggggtgaagtgcagggatcagtgtttttcacaagctccatacctccaggaaatggtgttgtggttgggcccgtagaaaacattctgagagtcctgttgcctgtgccttggtgcacgtggggtggaatcccagtggccctgccttgaggaggatgtgcattaacgtggtaggggagacagagacagctccacctgccccctgtcccaccggggacctccaaaaacttcatggatgttagagcaagcagccatgctgcagcagaggatgaggctggcggatttagtaagagccctctgtgtttgggctgagttctttctctagttgccctgtcatctggcctctggataacccacctctcctccctcatcctaaaattacagatggcgaaagacggccacatttagtgagacccctaaggtcctccaactagggtgggtccacagtggcccctggtgcatggaccacacactctcttccctcctctggctcaggactacggtctgaaattagggagatatgaatgtctttcttgaaaacttctcttcccagtcttcccactttgcttgggggtccttggtcaaggccagctttggggactagggcttgttgcgactaccagctgtctcattttgctgtactgcaaactcaggcttggttccaagcttatgggggccctgtccttcccctagtagggtttgttttggggtcacatctggtcatacccttcagagagctcttccccagcctctacatcagggagagaggtaggtagggaggagcattcaaggattagaagaaggactaaagtacaacagccttggaggaactgccaggaactaagggcgagcactggagaaggcaacctgggacccccctgcgcttctgagcaggaagaccaagaccttcaggggccctaagcactgaaaacatcattcctcatccccaagccctggcatccccctgttcttctaaaataattcttttctaggtatttctgattgcaaaattctggatgggttcatccaagctgacctttgctgtttttccccttcccaacaaggcctcactttttggagccaccttagctggtgcctaggcagaggggcagtcagcagtggttatcaggatcctggctctatgggttgccttcctcctggtctgtaaagcccctgcaggcagggacttcttagatagctgcttccttagggcatggcatgtagtgggtggttaatgaatgtaagagagggaatgagtgatcaagggagggaggagggagtggagtggagatttctcatcctttcctgttaatttatgacatcctcctgcctatgagtccttgactctggagttttacaaagcagtcacatttcaaataaaagtctgggaaagcaac

SEQ ID NO: 1668 - DNA, 408 bp, Homo sapiens
aaacagtaagggactgcaattttctattctttttctaatatccttatttagcaaaattaaaagttggcgatgatgtgttgctttcccagacttttatttgaaatgtgactgctttgtaaaactccagagtcaaggactcataggcaggaggatgtcataaattaacaggaaaggatgagaaatctccactccactccctcctccctcccttgatcactcattccctctcttccattcattaaccacccactacatgccatgccctaaggaagcagctatctaagaagtccctgcctgcaggggctttacagaccaggaggaaggcaacccatagagccaggatcctgataaccactgctgactgcccctctgcctaggcaccagctaaggtggctccaaaaagtgagg

SEQ ID NO: 1669 - DNA, 576 bp, Homo sapiens
ccttctctcctacctcccaggagtatgtaactcagatccttagcataaagatccccaggaataccactgctctaacccggtgaacattttttctaatgcagggttaggcttacgtctgaattccacaagacatcctccccctccagtacggaagttccaaggcacttgttttccagcatatcagcctaacctcagtgccttgaaatatggctttaagcctttgagaactgagatttcctgaaaccataggcccttgccccaggggtttctccacatccgggtgttaagacacctgatggcactgttggtttgtcccctataccccagaaaatctatcctgcaaggtagctacttcaatcttgtcattaaaatgtgtcaagtcacagctcgcaatgccaaaggaatgctggggcagtaagtgaggtggataagtgagaagggcctggtggtgaaagcggccagggaccagaatgctccagacctacagagctggtcaaggttaagtgccttaaacttaccaatcctggactcagttctcctttgaaaggagaaagtctttgtcctctacttaggcag

SEQ ID NO: 1670 - DNA, 746 bp, Homo sapiens
aaatttataaatgctggagggggccatctgatttgaataaagttgaaagaacatgttaaagtcagtcttaaggagtcacgtttgagtatgtaaattttgatctttctaatatgttggtttgtatattcagttttaactgtatgaatctgatttgcaaatgagaatttggaaaagttaaattagttacaaagaaatatgttaatttaattagacaatactctggaaggaattttatcttctttcaacaaaacatgttttatagtattctgacttacggttgcttttgagttttactcatttggatatattaagatgcacacagtgaagcaaattaaactccactttacgctggaatgctttctttagcatgaaaataccaggtccttggatttgggattttaatttcctatggaaagttgcttaaattgtggacactggaattaatctgaatgtcactgaggaatttcacatgaagtgtaatccctagtcaataagaattatccattacattattttatgggaaaactaggctaaattacatccattcaggtaaaaggaccttagcttactgaaggatctaaagagcaaagcaaagatctcactactcaaacactcagcctgcttccttcaagtccccttgcaggccagctttgtgctttgcagaccaactttttaatgagatactttgcttcctcattcaacattgaagctaggcttcaattaaaaggttcgaggaagctccattt

SEQ ID NO: 1671 - DNA, 2442 bp, Homo sapiens
ggacgagccagaactgtcggacagcggggacgaggccgcctgggaggatgaggacgatgcagatctcccccacggcaagcagcagaccccctgcctgttctgtaacaggttattcacatctgctgaagaaacattttcacactgtaagtctgagcatcagtttaatattgacagcatggttcataaacatggacttgaattttatggatacattaagctaataaattttattagacttaagaatcctacagttgagtacatgaattccatatacaacccagtgccttgggagaaagaagagtatttgaagccagtattagaagatgaccttttacttcaatttgatgtagaagatctttatgaaccggtgtcagtacccttctcataccccaatggactcagtgaaaatacatctgttgttgaaaaattgaaacatatggaagccagggcactgtctgctgaagccgcattggccagagcacgtgaggatctgcaaaaaatgaaacaatttgctcaggattttgtgatgcacacagatgtcagaacctgctcgtcatctactagtgtcattgcggacctccaggaggatgaggatggtgtttatttcagctcatacgggcattatgggatacatgaagaaatgctaaaggacaaaatacgaacagaaagctaccgagatttcatataccaaaatccacatatcttcaaagacaaggtagttttggatgttgggtgtggaactggaattctctctatgtttgctgctaaagctggggcgaagaaggttcttggagttgatcaatctgaaatactttaccaggcaatggatattataagactaaataaacttgaagatactattacactaattaaaggaaagattgaagaagttcatcttcctgtagaaaaagtagatgttatcatatctgagtggatgggctattttcttctgtttgagtctatgttagattctgtcctttatgcaaagaacaaatacttggcaaaaggaggctcggtctaccctgacatttgcactatcagccttgtagcagtgagtgatgtgaataaacatgctgatagaattgctttttgggatgatgtctatggcttcaagatgtcctgcatgaagaaagcagttattccagaagctgttgtggaagttttagatccgaagactcttatttcagaaccttgtggtattaagcatatagattgccatacgacgtctatctcagatttggaattttcatcagattttaccctgaaaatcacaaggacatccatgtgcacggcaattgctggctactttgatatatattttgagaagaattgccacaacagggtcgtgttctctacgggccctcagagcaccaaaacacactggaaacaaacagtatttctactggaaaaaccattttcagttaaagcaggtgaagccttgaaaggaaaggtcacagttcacaagaataagaaagatccacgttctctcaccgtgaccctcacgttgaataattcaactcaaacttatggtctccagtgaaacagccataaaagcacactaccttgtagtttttaatgtgggggtagagtgggtcagcaggagggagctggttttatgtgagcagatggatggatgatggaccctttcctaatgagcctcctcaataagagagaagttctcattgtgggaatctgacatagttcagctgaggaagagaatcagctgatcctcatggtctgccacgtaatcattttcttagacgtttgctccaccagatttaaccaaatgtaactcccacattgagtttatctatattgaaaatcatttacattggcctatatttggaagagagatagtcttttgtttttaataagtttcttactataaattttaaacaaattggttagttatttggatattttattaaactagtaacacaggtactacacattttattatggactcctctgaggaggagtgtttaattgtatttgctagaaaatcaggatgtaataaagatttgtataaaaaaactaaaatatggaaaagagcttcagccttcatatacaaatcatatatgcagacagcctagttgattatctagcatacttagggttctcattttgtagtttcttccctctttgtgactattccttagccttatagatttctagtactgcccaggaaatctaatttcaatacatttatcctaggtttcatgaaagtttttaaagattgggataaatatgtacttatttactaacgtattatctttttcaaaccagatttatgtgcaaaggttaaacatgtaactgttactaagcagtctataaagttgtcatttacaattactgattcaatttgaaatgtagaataaaattttaataaaatgtatccttataaaatattttaaaaatattaaaaaaaaaaaaaaaaaaaaa

SEQ ID NO: 1672 - DNA, 1256 bp, Homo sapiens
  misc_feature 683, 917: n = A,T,C or G
ccagagcacgtgaggatctgcaaaaaatgaaacaatttgctcaggattttgtgatgcacacagatgtcagaacctgctcgtcatctactagtgtcattgcggacctccaggaggatgaggatggtgtttatttcagctcatacgggcattatgggatacatgaagaaatgctaaaggacaaaatacgaacagaaagctaccgagatttcatataccaaaatccacatatcttcaaagacaaggtagttttggatgttgggtgtggaactggaattctctctatgtttgctgctaaagctggggcgaagaaggttcttggagttgatcaatctgaaatactttaccaggcaatggatattataagactaaataaacttgaagatactattacactaattaaaggaaagattgaagaagttcatcttcctgtagaaaaagtagatgttatcatatctgagtggatgggctattttcttctgtttgagtctatgttagattctgtcctttatgcaaagaacaaatacttggcaaaaggaggctcggtctaccctgacatttgcactatcagccttgtagcagtgagtgatgtgaataacatgctgatagaattgctttttgggatgatgtctatggcttcaagatgtcctgcatgaagaaagcagttattccagaagctgttgtgnaagttttagatccgaagactcttatttcagaaccttgtggtattaagcatatagattgccatacgacgtctatctcagatttggaattttcatcagattttaccctgaaaatcacaaggacatccatgtgcacggcaattgctggctactttgatatatattttgagaagaattgccacaacagggtcgtgttctctacgggccctcagagcaccaaaatacactggaaacaancagtatttctactggaaaaaccattttcagttaaagcaggtgaagccttgaaaggaaaggtcacagttcacaagaataagaaagatccacgttctctcaccgtgaccctcacgttgaataattcaactcaaacttatggtctccagtgaaacagccataaaagcacactaccttgtagtttttaatgtgggggtagagtgggtcagcaggagggagctggttttatgtgagcagatggatggatgatggaccctttcctaatgagcctcctcaataagagagaagttctcattgtgggaatctgacatagttcagctgctggacatgtcctaaaagcag

SEQ ID NO: 1673 - DNA, 1035 bp, Homo sapiens
gggacattcagtccgggccatagaaaatggagcagtgcagaccattgcccaaagaagcaaggaagagcaggagaaggtggaggcagacatgatccagcagagagaagagtgggaccgaaagaagaagatgaaggttaaacgggagcgaggatggagtggaaactcatggggaggcatcagtcttggcccccctgaccctggtccctgtggagaaacatatgaggattttgataccaggatacttgaggtaagaaacgttttcactatgactgcgaaagagggaagaaagaaatcgatccgtgtcttggtggctgtggggaacggaaaaggagctgcaggtttttctattgggaaagctactgatcggatggatgctttcaggaaagcaaagaacagagcagttcaccatttgcattatatagaacgatatgaagaccatacaatattccatgatatttcattaagatttaaaaggacgcatatcaagatgaagaaacaacccaaaggttacggcctccgctgccacagggccatcatcaccatctgccggctcattggcatcaaagacatgtatgccaaggtctctgggtccattaatatgctcagcctcacccagggcctcttccgtgggctctccagacaggaaacccatcaacagctggctgataagaagggcctccatgttgtggaaatccgggaggaatgtggccctctgcccattgtggttgcgtccccccgggggcccttgaggaaggatccagagccagaagatgaggttccagacgtcaaactggactgggaagatgtgaagactgcacagggaatgaagcgctctgtgtggtctaatttgaagagagccgccacgtaacctctctggccttgtgcagccagttcctgtgctgccctgcacctaggagagactcagcccctcacagcttgggatgttaccttgccttttgtttgttttgagggaagtttaatctttaaactctttggaaataaataattatagctttcaaaaaaaaaaaaaaaaaa

SEQ ID NO: 1674 - DNA, 754 bp, Homo sapiens
aaatcttaatgaaatatcatggaatattgtatggtcttcatatcgttctatataatgcaaatggtgaactgctctgttctttgctttcctgaaagcatccatccgatcagtagctttcccaatagaaaaacctgcagctccttttccgttccccacagccaccaagacacggatcgatttctttcttccctctttcgcagtcatagtgaaaacgtttcttacctcaagtatcctggtatcaaaatcctcatatgtttctccacagggaccagggtcaggggggccaagactgatgcctccccatgagtttccactccatcctcgctcccgtttaaccttcatcttcttctttcggtcccactcttctctctgctggatcatgtctgcctccaccttctcctgctcttccttgcttctttgggcaatggtctgcactgctccatttttcataagagggacattcagtccgggccatagaaaaccataacgcccttcaccaatgatctgacccctgttcagatcctttcttttcttctttttagttcttttgcctcttcctttttttgctccagcaccagtctctgctaaagcgcctttccacagctcatctgcagtcaatttagtgaagaaactatatggtctatactgctggctcatcaggtgactgggagaagaaatacagcattgtgtctgcagtgcacggctcaagctggcgtagggatgggtgtctctggttcccagtgatgacaaatgg

SEQ ID NO: 1675 - DNA, 350 bp, Homo sapiens
cacaaagccagggccaggctccccatccctacctcccactgcatcagcagtgggtgttcctgcccttcctgagtctaggcagctctgctgctgtgatctgcacaccctccaacctaggcagggactggggggatgcagtgtgtgttagtgcccatgtggcattgtggcactgttgccccccatggcggcatgggcaagatgaccttccattagcttcaagtcttgttctcttgtctgtggtctgtttaatatgtgggtcactagggtatttattctttctcccatccttacactctggatcattgtgcagacttaatcagggttttaacgctttcatttttttttttttt

SEQ ID NO: 1676 - DNA, 523 bp, Homo sapiens
  misc_feature 200: n = A,T,C or G
tcagtgtaaacactgaccataactagaaaggaaacttaggtgcctatataattttccattccccgcctaatagtattcaactcagcctcttgaggtgggaataaaaactaaaaaaagattgatgttatagtaaaactgaacagtggcacagcaaggtgcctccctttaaggattttaccttcctgtgaagcaaacttcanagttcccatcttctcagcgtgatcacggaataggcaaacttcacaggaaggatgcctaaggatgccttttcctctctaagagttctcaggaagttgggtaggctgtgtatggactcccaactgctttaacctcctatctccatgtcttatttcccttcccctgcctgctctatcctcgcctctattttcctcagcaaacatactctgcagtcggtcccttgtccatggcacaccaccaacttttcagtagtgttaccatgcccacctctggcttcctctagtctggccatcttgtaagtgtcatactgcacaaaaaaagtagg

SEQ ID NO: 1677 - DNA, 425 bp, Homo sapiens
ctcaaaacctcactatttaatggagtgcctttgtctctacttgaattgcgttttttccttgagacccagtgcagggaatcccccatcccagggtgtttttctttccgatcttttcccagcaggaacctttaaaagcttcctccagtggaatgccttaggggtcctcccatttctgagacagaaacatggttgatctcccttactctcctgcaatttatggcttgttccagacatgagaaatgactcacatttcctttgggcagtcagcagcagatttatgcatttccctttttgttctcatcctcttatcttgacttccagataagtagatgtcttttagccaaaactttgcttttgagaagaatgactttggttttcctctctcaggtgtgagcggggcctggaccacgccatcccccactatg

SEQ ID NO: 1678 - DNA, 1275 bp, Homo sapiens
tgccgcagcccccgcccgcccgcagagcttttgaaaggcggcgggaggcggcgagcgccatggccagtccgggctgcctgctgtgcgtgctgggcctgctactctgcggggcggcgagcctcgagctgtctagaccccacggcgacaccgccaagaagcccatcatcggaatattaatgcaaaaatgccgtaataaagtcatgaaaaactatggaagatactatattgctgcgtcctatgtaaagtacttggagtctgcaggtgcgagagttgtaccagtaaggctggatcttacagagaaagactatgaaatacttttcaaatctattaatggaatccttttccctggaggaagtgttgacctcagacgctcagattatgctaaagtggccaaaatattttataacttgtccatacagagttttgatgatggagactattttcctgtgtggggcacatgccttggatttgaagagctttcactgctgattagtggagagtgcttattaactgccacagatactgttgacgtggcaatgccgctgaacttcactggaggtcaattgcacagcagaatgttccagaattttcctactgagttgttgctgtcattagcagtagaacctctgactgccaatttccataagtggagcctctccgtgaagaattttacaatgaatgaaaagttaaagaagtttttcaatgtcttaactacaaatacagatggcaagattgagtttatttcaacaatggaaggatataagtatccagtatatggtgtccagtggcatccagagaaagcaccttatgagtggaagaatttggatggcatttcccatgcacctaatgctgtgaaaaccgcattttatttagcagagttttttgttaatgaagctcggaaaaacaaccatcattttaaatctgaatctgaagaggagaaagcattgatttatcagttcagtccaatttatactggaaatatttcttcatttcagcaatgttacatatttgattgaaagtcttcaatttgttaacagagcaaatttgaataattccatgattaaactgttagaataacttgctactcatggcaagattaggaagtcacagattcttttctataatgtgcctggctctgattcttcattctgtatgtgactatttatataacattagataattaaatagtgagacataaatagagtgtttttcatggaaaagccttcttatatctgaagattgaaaaaaataaatttactgaaatacaaatatttt

SEQ ID NO: 1679 - DNA, 527 bp, Homo sapiens; identical to SEQ ID NO: 674

SEQ ID NO: 1680 - DNA, 2642 bp, Homo sapiens
ctgaacctgcagaaacagctgctcccttggcagcttgggcccttcagaacagcttgcccagcccccgctgctgccttccatggcctccagccgcagccctcaagttgaggaggggttccagcatcacactcctctgggtgaactttccctggattttgtggttggcaggcaacctgggcaaagaacagtcaccaggcaagcaggctggaaggaagaaattcttgaatgtggatagacttcctcctcccctgccctcgagctccaccccaagccacttctcacatcaccccttcttcccccacagatgtcaccgggtgcgcatcaatgtacctccacacagagggcttctctgggccctctccaggtgacggggccatgggtaaggcagccccccttcccctgccaagccctccatgttgggggagggagcgctgccatgggggagggtctccctggccaggagtccctctggactctctggggtctcatcggtgaacccccagatctgagcaacccccaatttcctccacaaggctatggctatgagaaacctctgcgaccattcccagatgatgtctgcgttgtccctgagaaatttgaaggtcagagaagtgactgttgatgggagggtcaaggtcttatcacgctgtgtccctgcaggagtcacatcacgtttcattgttgcaagagggtgggacccatagaaaagtacctggggagaccccttcgagaaatccctcgggtgggaggcggttgcttgggggaccaaaagacacaaaccccacacctcctattttcgtgttccccaggagacatcaagcaggaaggggtcggtgcatttcgagaggggccgccctaccagcgccggggtgccctgcagctgtggcaatttctggtggccttgctggatgacccaacaaatgcccatttcattgcctggacgggccggggaatggagttcaagctcattgagcctgaggaggtgggcctctcggatgttcccagccctcctttccaaagtttacagcctggaggtgggagaacctgggaaatggtggcacgtgcctccatcatgattcttgctttacctaacctgaattcttgccaagcctaagtctgtgggctgatgctttgttgcagagctagcttggcactttgcaccaagaatctcaagtgctctttctgaccttacccccattttttcctctgccaaggtagcatctctaccccaaaactgttttgttcccaggtcgccaggctctggggcatccagaagaaccggccagccatgaattacgacaagctgagccgctcgctccgatactattatgagaaaggcatcatgcagaaggtgggggctgtgggtctagggacaaggtggtggggggcagtggctgtgagaagctgactggggagagggtcagcagggcagttctcagcaactttgtaggatcagataatgaatcagtcagagagacaagaaattgtggagaatcccaaggttctcctcccccaaaaaagtgcaacactgtaactgagaagcccaagcatggagaagttgagatgaaaaaggagtaagaactgtgaagggagagtcagcttctcaggaaccagcatgggagagaaatgccccgagcatctgcctgtactggtagaagggccacattccccactcccccaccttaccccatacaaaggctgggcggctagcaggctgaccagaccttctctctccccataggtggctggtgagcgttacgtgtacaagtttgtgtgtgagcccgaggccctcttctctttggccttcccggacaatcagcgtccagctctcaaggctgagtttgaccggcctgtcagtgaggaggacacagtccctttgtcccacttggatgagagccccgcctacctcccagagctggctggccccgcccagccatttggccccaagggtggctactcttactagcccccagcggctgttccccctgccgcaggtgggtgctgccctgtgtacatataaatgaatctggtgttggggaaaccttcatctgaaacccacagatgtctctggggcagatccccactgtcctaccagttgccctagcccagactctgagctgctcaccggagtcattgggaaggaaaagtggagaaatggcaagtctagagtctcagaaactcccctgggggtttcacctgggccctggaggaattcagctcagcttcttcctaggtccaagccccccacaccttttccccaaccacagagaacaagagtttgttctgttctgggggacagagaaggcgcttcccaacttcatactggcaggagggtgaggaggttcactgagctccccagatctcccactgcggggagacagaagcctggactctgccccacagctgtggccctggagggtcccggtttgtcagttcttggtgctctgtgttcccagaggcaggcggaggttgaagaaaggaacctgggatgaggggtgctgggtataagcagagagggatgggttcctgctccaagggaccctttgcctttcttctgccctttcctaggcccaggcctgggtttgtacttccacctccaccacatctgccagaccttaataaaggcccccacttctcccatt

SEQ ID NO: 1681 - DNA, 444 bp, Homo sapiens
cagctcagcttcttcctaggtccaagccccccacaccttttccccaaccacagagaacaagagtttgttctgttctgggggacagagaaggcgcttcccaacttcatactggcaggagggtgaggaggttcactgagctccccagatctcccactgcggggagacagaagcctggactctgccccacgctgtggccctggagggtcccggtttgtcagttcttggtgctctgtgttcccagaggcaggcggaggttgaagaaaggaacctgggatgaggggtgctgggtataagcagagagggatgggttcctgctccaagggaccctttgcctttcttctgccctttcctaggcccaggcctgggtttgtacttccacctccaccacatctgccagaccttaataaaggcccccacttctcccaaaaaaaaaaaaaaagggcg

SEQ ID NO: 1682 - DNA, 1513 bp, Homo sapiens
attcacttctcacaaggactgggtgaagagttctgcagccttacagagactggaaaagaagcccaaaccaaggcccccagagaggtcccccaggcccctttgggtccctgagcctcagctggaggtggggggtgcctgcagtgcgctggctcagtctccttctgaaaagctggatccagcttgtttgaagcccttgagctgatcttagatccggcgcaggagaccaacgcctgccatgctgttccggctctcagagcactcctcaccagaggaggaagcctccccccaccagagagcctcaggagaggggcaccatctcaagtcgaagagacccaacccctgtgcctacacaccaccttcgctgaaagctgtgcagcgcattgctgagtctcacctgcagtctatcagcaatttgaatgagaaccaggcctcagaggaggaggatgagctgggggagcttcgggagctgggttatccaagagaggaagatgaggaggaagaggaggatgatgaagaagaggaagaagaagaggacagccaggctgaagtcctgaaggtcatcaggcagtctgctgggcaaaagacaacctgtggccagggtctggaagggccctgggagcgcccaccccctctggatgagtccgagagagatggaggctctgaggaccaagtggaagacccagcactaagtgagcctggggaggaacctcagcgcccttccccctctgagcctggcacataggcacccagcctgcatctcccaggaggaagtggaggggacatcgctgttccccagaaacccactctatcctcaccctgttttgtgctcttcccctcgcctgctagggctgcggcttctgacttctagaagactaaggctggtctgtgtttgcttgtttgcccacctttggctgatacccagagaacctgggcacttgctgcctgatgcccacccctgccagtcattcctccattcacccagcgggaggtgggatgtgagacagcccacattggaaaatccagaaaaccgggaacagggatttgcccttcacaattctactccccagatcctctcccctggacacaggagacccacagggcaggaccctaagatctggggaaaggaggtcctgagaaccttgaggtacccttagatccttttctacccactttcctatggaggattccaagtcaccacttctctcaccggcttctaccagggtccaggactaaggcgtttttctccatagcctcaacattttgggaatcttcccttaatcacccttgctcctcctgggtgcctggaagatggactggcagagacctctttgttgcgttttgtgctttgatgccaggaatgccgcctagtttatgtccccggtggggcacacagcggggggcgccaggttttccttgtcccccagctgctctgcccctttccccttcttccctgactccaggcctgaacccctcccgtgctgtaataaatctttgtaaataacaaaaaaaaaaa

SEQ ID NO: 1683 - DNA, 700 bp, Homo sapiens
ctgggggacaaggaaaacctggcgccccccgctgtgtgccccaccggggacataaactaggcggcattcctggcatcaaagcacaaaacgcaacaaagaggtctctgccagtccatcttccaggcacccaggaggagcaagggtgattaagggaagattcccaaaatgttgaggctatggagaaaaacgccttagtcctggaccctggtagaagccggtgagagaagtggtgacttggaatcctccataggaaagtgggtagaaaaggatctaagggtacctcaaggttctcaggacctcctttccccagatcttagggtcctgccctgtgggtctcctgtgtccaggggagaggatctggggagtagaattgtgaagggcaaatccctgttcccggttttctggattttccaatgtgggctgtctcacatcccacctcccgctgggtgaatggaggaatgactggcaggggtgggcatcaggcagcaagtgcccaggttctctgggtatcagccaaaggtgggcaaacaagcaaacacagaccagccttagtcttctagaagtcagaagccgcagccctagcaggcgaggggaagagcacaaaacagggtgaggatagagtgggtttctggggaacagcgatgtcccctccacttcctcctgggagatgcaggctgggtgcctatgtgccaggcttcaa

SEQ ID NO: 1684 - DNA, 2261 bp, Homo sapiens
gcggatggatccaacatggcggcgccgagcctgagccgagagaagagacctgggaaattaagtttcttgcggagtacggtggggattgcagctgctgagcagggattctggaaagcattgcgtacctgagcccccagcatggcgggcctaaagcggcgggcaagccaggtgtggccagaagagcatggtgagcaggaacatgggctgtacagcctgcaccgcatgtttgacatcgtgggcactcatctgacacacagagatgtgcgcgtgctttctttcctctttgttgatgtcattgatgaccacgagcgtggactcatccgaaatggacgtgacttcttattggcactggagcgccagggccgctgtgatgaaagtaactttcgccaggtgctgcagctgctgcgcatcatcactcgccacgacctgctgccctacgtcaccctcaagaggagacgggctgtgtgccctgatcttgtagacaagtatctggaggagacatcaattcgctatgtgacccccagagccctcagtgatccagaaccaaggcctccccagccctctaaaacagtgcctccccactatcctgtggtgtgttgccccacttcgggtcctcggatgtgtagcaagcggccagcccgagggagagccacacttgggagccagcgaaaacgccggaagtcagtgacaccagatcccaaggagaagcagacatgtgacatcagactgcgggttcgggctgaatactgccagcatgagactgctctgcagggcaatgtcttctctaacaagcaggacccacttgagcgccagtttgagcgctttaaccaggccaacaccatcctcaagtcccgggacctgggctccatcatctgtgacatcaagttctctgagctcacctacctcgatgcattctggcgtgactacatcaatggctctttattagaggcacttaaaggtgtcttcatcacagactccctcaagcaagctgtgggccatgaagccatcaagctgctggtaaatgtagacgaggaggactatgagctgggccgacagaaactcctgaggaacttgatgctgcaagcattgccctgacctattccctcttctcactttggggactgttcccatcacccacctctggagcttacactgttctggggtttgttctctacccttccaaccaatcacacccctgcctttttttttttttttttaaagaaaaagacaaaagaaagtggaagtggtattccccacccctccctgcacccatgtgcctgggcttcccctttatttcccttttccatttaccccgtaatgtgtctctacagctaccttaccactgagccgtaagacaaatgtataggaagaagcaaagtctacagcacatagtctttgtaagggattgatgtgaacacttttttttggatgcactaaggagttatcaatacttctggctttatgagagctcttaaattttgtctaaaaaaccaaagggctgtgagtaagggagctatgtggaaagtgggactctgaagtgtattttgaaaattaatcgccaccctcttccaaattatagaattttttaaaaacaagctgtggccctttccactctctcctggcctctggtgctgctcctctctgccgcctttcctccattccatggcttgaaacctctgcctgatgtggctccttcctttttcccatttgtcaaaccctcttcaaaggaggaacagataagactgggtcagcctagtcatgcctcccaactgtggtggtatatgtgtacacacatacacagggtggatggagaagaggttgctgattaaaatacactccccctataaaggggaagggggagtgtgacactttctttccatgttcaagtgaaaataaataatgtaccctgcagcccttttcccctttgctttcttctggcttgggcaaagggcatcataggtgtaagtgaagtaattcctttttccttccccctcctccactcctacgcccactcccatgcttgggagaatggggctgggacatgcactgagtgttgcacttttatttaggtagggaggcatgttgaatgagccaggaggtctagaactggagcttagtccagctggtacaataccaactccccttctagttcccaaaggcgatgtccagacacagactttatgattattatatttttcaatgccagtgctgctcagccctcagcagaacttcagtttccatgaaataaacaatgactatat

SEQ ID NO: 1685 - DNA, 370 bp, Homo sapiens; identical to SEQ ID NO: 1008

SEQ ID NO: 1686 - DNA, 2866 bp, Homo sapiens
tcacctgggaaatacaaaaatagcccctcctgaagataaaatcattcagaaacagagcaataattctgactcattaacttctacctactcaaaaaagtctgccatgatgatggaccgaagtgaggctttttaacccacaagtaacctttttatttttttgagacagtcttgctctgtctgtcacccaggctggagtacagtggcatgatcttggctcactgcagcctcgacttcctgggctcaaatgatcctcccacctcagcctcccatgtggctggaaccacaggcacgtgccaccatgcctggctatttttttgttgagctgggctctcgctttgttgcccaggctggtcttgaactcctcggctcaagcaatccttcccactcagcctcctgtagtgtcgagaatataggcgtgggctactacacctgcttcagccgcttctataaaaccgctgacctgtgtgtggaggacaggccaggtgtgtgctcactgcgctgcgaagatgttttgtcacgtgactttccccggatttccatttctttttttctgcttccctcaaaaactaatagaagactgggtgcggtggctcacgcctctaatcgcagcactttgggaggcagcagctggcggatcacaaggccaggagttcgagaccagcctggccaacatgatgaaaccctgtctctaccaaaaatacaaaaattagctgggtgcgatggtgggtgcctgtaatcccagatactcaggaggctgaggcaggagaattgtttgaaccccggagatggaggttgcagtgagccaagatcgtgccattgcactccagcctgggcaacagggcaagattccgtctcaaaaacaaacactattagaaaatgccctggaggtggcggggagttgttgatttgtgaggacagattgaaagcaactcccagggtggccttgtccacctccccgtcgagaatgtggctgccggcctctttgaagattgtggtctggcataaggagaggtgcaggcgcctggttctgagcaccttggaatttccagccgcacagcatctggtgccctcccctccaccctcacaaggagctgccatcctgtttggattttctgtttgtggaccagaaacaaacgtttttccaaaggattagcaaatagggtaatttcctgtgtaacgctgctctggggcctcttcctcatcctggcagaaggagcctggagcccatgaggcagccagcactgtgcccttgctcagtcgtgctgtcccctccctctccctcagtctcctctccatgcccaagtcagtttccagccgctggtcttcatggcattcccagcacagccgggcaccaagaggcaaaacccaaggcctggcttggccgtgttaacgattgtacagacattttttaaaataactttgtgtaatacttttctggaatagtaagttcttgttgaactgtcacaggtgagcttctaggaacacaccaggtgtggttacttccactgggtgtgtccatggtcgtggtctgtgcttttgtaaacgaacagaacacttgaaccacctcccgaattgggtcatcggcttctttacgttgatacttaagagatttgcagctctctttcaaggaaacttcccctactgaaaggcataaaaaggttaaaaaagaaaatccgagagtcccaattccctgtataacagcattaaaataatctgcctgcctggaaagatgagaacactgttgcacaacccaaaatgtgtctttaatttgtgaaaaattaccatggtgagtcagacagtcattttaaacagctgaacagagactatcatcagcaaatagagctcagctttgtagctgcctttaaaatccttgtcccaaatccggtgagctctgcttgctgccgccgcgctcctgggtgatcactcagacgggtcagtgggaataacaggccaacaagacagctttttacatgtgtccaaaggatggcctttcgaaggcctggaagtatttcactgttggaagaagtaaacaagaatgacattccagatggaaatagaattctctctcttgcctttgaccaacatggtactaaggggtttcttctttcccaatgtatgtacgtgccctgctgggggccttactttatagaatgagagcatccgagcttccctaatgaatctggctagttctgtgtctggctgaggatacaggagtgggacatccactctcggatccctcagagcacagaaaccttcagctttgctgtctctgaagtatttcctccagtttccctgcgggcccctatgtttgagtttgatggctgctggatcctcactcaacgaaaactcggttggaaactgttccgcctggcagtcctttttttgttgttttccatctcatttcccttccatctgaaagtggcattcagctgacttgctcatttagactgttcacggagtctgaatctgccaacgtggtgttggaggctccaccttgaaaagggccacagtcagggcaactttccccatacaggaaaacttgaaaattacatcaacagtctacgtcacagccaaattatatttcctttataccaaacaaaactatggagaactaaaagtacatcacacaaaacgtttatagtgttttgcatgtgacctatttcagtatttatataactagattagtgctttctagcaaacggttctgttaattagcgagtcactgttgattctgctgtggtggtaagttgataccgtgtaactaatcccgtggatgcctcctcgttatttttgtccaaacgaagcagccgtggtagtagctgtctatgattcttgctcagcaaagtaaaataaatgttaaatatgg

SEQ ID NO: 1687 - DNA, 402 bp, Homo sapiens
aaaataactttgtgtaatacttttctggaatagtaagttcttgttgaactgtcacaggtgagcttctaggaacacaccaggtgtggttacttccactgggtgtgtccatggtcgtggtctgtgcttttgtaaacgaacagaacacttgaaccacctcccgaattgggtcatcggcttctttacgttgatacttaagagatttgcagctctctttcaaggaaacttcccctactgaaaggcataaaaaggttaaaaaagaaaatccgagagtcccaattccctgtataacagcattaaaataatctgcctgcctggaaagatgaggacactgttgcacaacccaaaatgtgtctttaatttgtgaaaaattaccatggtgagtcagacagtcattttaaacag

SEQ ID NO: 1688 - DNA, 4932 bp, Homo sapiens
cagaaatgcaacaagtagtacccggggtctgcagagcgccccgcgccgcctgacttggccgggcgaagcccgcctgcagagacccgggccggcctccggacaaaggacggaggaggggctggacggcgctgcgaagtccgaaagaggccatttagcgactctggccaggctaaggggaatgcagaggagacacagagccggcgggccaagaggacgatccggccgctgcacgcagggcgggaggcgatggaggctgcccgcgccttgcgcctcctgctcgtggtgtgcggctgcctcgcgctcccgccgctgccgagcccgtgtgcccggagcgctgcgactgccagcatccccagcatctcctgtgcaccaacagggggctccgcgtagtgcccaagaccagctcgctgccgagcccccacgacgtgctcacctacagcctcggcggcaacttcataaccaacatcacggccttcgacttccaccgtctggggcagctcagacggctggacctgcagtacaaccagatccgctctctgcaccccaagaccttcgagaagctctcgcggctggaagagctgtacctggggaacaacctcttgcaggcgctcgccccgggcacgctggccccgctgcgcaagctgcgcatcctctacgccaacgggaacgagatcagccgcctaagccgcggctccttcgagggcctggagagtctagtcaagctgcggctggacgggaacgccctgggggcgctgccggacgcggtcttcgctcccttgggcaacctgctctacctacatctggagtccaaccggatccgctttctgggcaagaacgccttcgcccagctaggcaagctgcgcttcctcaacctctctgccaacgagctacagccctccctgcgccacgcggccaccttcgcaccgctgcgctccctctcctccctcatcctctcggccaacaacctgcagcacctcgggccgcgcatcttccagcacctgccacgtctcggcctgctctcgctcaggggcaaccagctcacgcacctcgcgcctgaggccttttggggcttggaggccctgcgcgagctgcgcctggagggtaatcggctgagccagctgccaactgcgctgctggagcctctgcacagcctggaggcgctggacctgagcggcaatgagctgtccgccctgcacccggccaccttcggccacctgggccggctgcgcgagctcagcctgcgcaacaacgcgctcagcgccctatccggggacatcttcgccgccagcccagccctttatcggctggatctagacggcaacggctggacctgcgactgccggctgcgaggcctgaagcgctggatgggcgactggcactcgcagggccggctcctcactgtcttcgtgcagtgtcgccaccccccggccctgcgaggcaaatacctggattacctggatgaccagcagctgcaaaatggatcctgcgcggatccctcgccctcagcttccctgaccgctgaccgcaggcggcagcccctacccacggccgcaggggaggagatgacgccacctgcaggtctcgcggaggagctgccgccgcagccgcagctccagcagcaggggcgatttctagctggggtggcctgggatggggccgccagggagctggtaggcaaccgcagcgccctaaggctgagtcggcggggcccgggcctccagcagcccagcccctccgtcgctgccgccgcgggcccggctccacagtccctagacctgcacaagaagccccagcggggccgtccgactcgggcagatcccgccctcgcggagcccaccccaacggcctctcctggctctgcgccatcgcccgccggcgacccctggcagcgcgcgacgaagcatcgtctgggcacggagcaccaggagcgtgccgcccagtccgacggtggggccgggctgccgccgctggtgtccgacccatgcgacttcaacaagttcattctgtgcaacctgacggtggaggcggtgggcgcagacagcgcctcggtgcgctgggccgtgcgcgagcaccgcagtccccggccgctgggcggcgcgcgcttccgcctgctctttgaccgctttggccagcagcccaagttccaccgcttcgtctacctgcctgagagcagcgactcggccacgctgcgcgagctgcgcggggacaccccctacctggtgtgcgtggagggcgtgcttgggggccgtgtctgccctgtggctccccgggaccactgcgcggggctggtcaccctaccggaggccgggagccggggcggcgtcgactaccagctgctgaccttggccctgctgacggtcaacgcgctgctggtgctcctggccttggcggcctgggcgtctcgctggctgcgtaggaaactgcgggctaggcggaagggcggggccccggtccacgttcggcacatgtactccacccgacggcccctgcgctccatgggcaccggcgtgtccgccgacttctcgggattccagtcgcaccggccacgcaccaccgtgtgcgcgctcagtgaggcggacctcatcgaattcccctgcgaccgcttcatggacagtgcgggcggcggcgcgggcggcagcctgagacgggaggaccgtctcctgcagcgatttgccgactaggtccagggcatatagagaccatctcattggccctaaggagccgcctctccgtgaggcccaccagcccacctcaggggaagtgccgttttgtgcacttgccagagaggccggtggggacagagggccaattcgggcaccatcccccaattcccaatactcgagaagtaaatggatggtacttggtggtcagagccagagtaggggacaaatggatggtgggatgctgaggtcggaggcttcgcttggaggctttgacacagctatgcgaatggcttttgtagcactgcaatgcagaagccaggctttgggggtagaaagggggtgcttgtgcccccaacatggccagaaatatttgggtgcatgctttttgtttgctcagtgtcaaacagagaagttttgtttctatttaaggaaggaacttattaccattacaaaggaggcttggccagggactccactggtttggtgatctctgccaagaagggggatgtaaacaggtggtaaagtttaacatacccgccaaggaactcgtttatgttggctgatagagcattcaggataccttaaagtttaataagagacgcatttttttttttcaaaaatgtgaaaagctctgacatttaacgaactgaccaatagactcaaggactgttttagttggactgggccattttattatgttccttttaatattaacagtacaagagcgcttgctgacttcgaggataactaagattacatactttctcaggagaaggctgcatgcaagacttctctgtcagggttgctcctgtggcttttttaattttatttttttaaacctatatatggaaaaggaaatttcaatgccagatttgataaaagaatgtgatgtatatgtagctgatgacccactggggaacaccagtgttccagttcacttaccacatctgtgacagtgtgtttagattggaataaatgtgatgcattacttcttatgtttttatcagtgacatggttgactgtgccctaattctcttgagttgcagttaagcaatgaaggttatttcctaatagggaagcaaaaggtgattgtcaattgatagtttaatgtttgaccacattagtgtctttatatgaaatagtagaggggaagaaattatagaaaacaaatgtgaaaaaaatacaccagtgggtatctgttctactaaaaccagaagattgttatgagtacttaaacctcactgtgaaataatgatatattttgcaattaatccctccccaactgagtgtcttactgtgttattaaatcttatcttttagttaatagttgcagtatttcttttaaatgtttttgttttaaacttaggggtaggatcctttatttgttcagttgtttccaactatttgggatactttcattccctgctatttatgaagtacatgtttatcactaagtgtagtggtttggtttacattaataattttatgtgtggtctaaaaatgcagtcactaagagaatgtacactgtggttatggtcacagtggttatggatttattggcagtggagtaccatggaggtcactgcaatggtgctaaggctgacagtggaatcttctgtttagggccttaagcccctgagggtcctggtgactcagggaatccatcacagccccgggtctttcaccccagttcactccttttatgtttggcctagattgacccatgcctgccctcttctcaacagctgagtagggaaccagccatctgaatgagctgatcgttgtttatgttcaaatgagtaaatgtccagaccacttaaaactacagctgcttttctggcagtctcgtctgcggggccaaaacttaataaaccacaggaaatagactgtcattcttagtttgctgccagggcttattttagattgagagcatactggtacatgagagcagtagtgttgtttgctcttattttcaaccagggagctatctggcaccttttgtgctcctggcttttttcaatcatagcactattgcatctcctagctatttcttttgcccagcagggtaatattgagtcccattgcaagtatggacaaggcctctggttctcctcaccacccaccttttcagccatagaacatcactgaaaatgcctaatgcctggatctgtgttctactttagtttcactgggaagtctttcagtgggagatgaataaatgttatacattgttatgtccagttatgtcaataaacccactaatagagat

SEQ ID NO: 1689 - DNA, 1009 bp, Homo sapiens
aaaaattaattaaagagaaagagaaaagcaacattttaatgccccaggaattgaaactaacgttttctgtctcggctggacccctacgcccatcttttaaacctatatatggaaaaggaaatttcaatgccagatttgataaaagaatgtgatgtatatgtagctgatgacccactggggaacaccagtgttccagttcacttaccacatctgtgacagtgtgtttagattggaataaatgtgatgcattacttcttatgtttttatcagtgacatggttgactgtgccctaattctcttgagttgcagttaagcaatgaaggttatttcctaatagggaagcaaaaggtgattgtcaattgatagtttaatgtttgaccacattagtgtctttatatgaaatagtagaggggaagaaattatagaaaacaaatgtgaaaaaaatacaccagtgggtatctgttctactaaaaccagaagattgttatgagtacttaaacctcactgtgaaataatgatatattttgcaattaatccctccccaactgagtgtcttactgtgttattaaatcttatcttttagttaatagttgcagtatttcttttaaatgtttttgttttaaacttaggggtaggatcctttatttgttcagttgtttccaactatttgggatactttcattccctgctatttatgaagtacatgtttatcactaagtgtagtggtttggtttacattaataattttatgtgtggtctaaaaatgcagtcactaagagaatgtacactgtggttatggtcacagtggttatggatttattggcagtggagtaccatggaggtcactgcaatggtgctaaggctgacagtggaatcttctgtttagggccttaagcccctgagggtcctggtgactcagggaatccatcacagccccgggtctttcaccccagttcactccttttatgtttggcctagattgacccatgcctgccctcttcaaaaacag

SEQ ID NO: 1690 - DNA, 3073 bp, Homo sapiens
gctacgcggagtgacatcgccggtgtttgcgggtggttgttgctctcggggccgtgtggagtaggtctggacctggactcacggctgcttggagcgtccgccatgaggagaagtgaggtgctggcggaggagtccatagtatgtctgcagaaagccctaaatcaccttcgggaaatatgggagctaattgggattccagaggaccagcggttacaaagaactgaggtggtaaagaagcatatcaaggaactcctggatatgatgattgctgaagaggaaagcctgaaggaaagactcatcaaaagcatatccgtctgtcagaaagagctgaacactctgtgcagcgagttacatgttgagccatttcaggaagaaggagagacaaccatcttgcaactagaaaaagatttgcgcacccaagtggaattgatgcgaaaacagaaaaaggagagaaaacaggaactgaagctacttcaagagcaagatcaagaactgtgcgaaattctttgtatgccccactatgatattgacagtgcctcagtgcccagcttagaagagctgaaccagttcaggcaacatgtgacaactttgagggaaacaaaggcttctaggcgtgaggagtttgtcagtataaagagacagatcatactgtgtatggaagaattagaccacaccccagacacaagctttgaaagagatgtggtgtgtgaagacgaagatgccttttgtttgtctttggagaatattgcaacactacaaaagttgctacggcagctggaaatgcagaaatcacaaaatgaagcagtgtgtgaggggctgcgtactcaaatccgagagctctgggacaggttgcaaatacctgaagaagaaagagaagctgtggccaccattatgtctgggtcaaaggccaaggtccggaaagcgctgcaattagaagtggatcggttggaagaactgaaaatgcaaaacatgaagaaagtgattgaggcaattcgagtggagctggttcagtactgggaccagtgcttttatagccaggagcagagacaagcttttgcccctttctgtgctgaggactacacagaaagtctgctccagctccacgatgctgagattgtgcggttaaaaaactactatgaagttcacaaggaactctttgaaggtgtccagaagtgggaagaaacctggaggcttttcttagagtttgagagaaaagcttcagatccaaatcgatttacaaaccgaggaggaaatcttctaaaagaagaaaaacaacgagccaagctccagaaaatgctgcccaagctggaagaagagttgaaggcacgaattgaattgtgggaacaggaacattcaaaggcatttatggtgaatgggcagaaattcatggagtatgtggcagaacaatgggagatgcatcgattggagaaagagagagccaagcaggaaagacaactgaagaacaaaaaacagacagagacagagatgctgtatggcagcgctcctcgaacacctagcaagcggcgaggactggctcccaatacaccgggcaaagcacgtaagctgaacactaccaccatgtccaatgctacggccaatagtagcattcggcctatctttggagggacagtctaccactcccccgtgtctcgacttcctccttctggcagcaagccagtcgctgcttccacctgttcagggaagaaaacaccccgtactggcaggcatggagccaacaaggagaacctggagctcaacggcagcatcctgagtggtgggtaccctggctcggcccccctccagcgcaacttcagcattaattctgttgccagcacctattctgagtttgcgaaggatccgtccctctctgacagttccactgttgggcttcagcgagaactttcaaaggcttccaaatctgatgctacttctggaatcctcaattcaaccaacatccagtcctgagaagccctgatcagtcaaccagctgtggcttcctgtgcctagactggacctaattatatgggggtgactttagtttttcttcagcttaggcgtgcttgaaaccttggccaggttccatgaccatgggcctaacttaaagatgtgaatgagtgttacagttgaaagcccatcataggtttagtggtcctaggagacttggttttgacttatatacatgaaaagtttatggcaagaagtgcaaattttagcatatggggcctgacttctctaccacataattctacttgctgaagcatgatcaaagcttgttttatttcaccactgtaggaaaatgattgactatgcccatccctgggggtaattttggcatgtatacctgtaactagtaattaacatcttttttgtttaggcatgttcaattaatgctgtagctatcatagctttgctcttacctgaagccttgtccccaccacacaggacagccttcctcctgaagagaatgtctttgtgtgtccgaagttgagatggcctgccctactgccaaagaggtgacaggaaggctgggagcagctttgttaaattgtgttcagttctgttacacagtgcattgccctttgttgggggtatgcatgtatgaacacacatgcttgtcggaacgctttctcggcgtttgtcccttggctctcatctcccccattcctgtgcctactttgcctgagttcttctacccccgcagttgccagccacattgggagtctgtttgttccagtgggttgagctgtctttgtcgtggagatctggaactttgcacatgtcactactggggaggtgttcctgctctagcttccacgatgaggcgccctctttacctatcctctcaatcactactcttcttgaagcactattatttattcttccgctgtctgcctgcagcagtactactgtcaacatagtgtaaatggttctcaaaagcttaccagtgtggacttggtgttagccacgctgtttactcatacagtacgtgtcctgtttttaaaatatacaattattcttaaaaataaattaaaatctgtatacttacatttcaaaaaaaaaaaaaaaaaaaaaa

SEQ ID NO: 1691 - DNA, 985 bp, Homo sapiens
ccaccattatgtctgggtcaaaggccaaggtccggaaagcgctgcaattagaagtggatcggttggaagaactgaaaatgcaaaacatgaagaaagtgattgaggcaattcgagtggagctggttcagtactgggaccagtgcttttatagccaggagcagagacaagcttttgcccctttctgtgctgaggactacacagaaagtctgctccagctccacgatgctgagattgtgcggttaaaaaactactatgaagttcacaaggaactctttgaaggtgtccagaagtgggaagaaacctggaggcttttcttagagtttgagagaaaagcttcagatccaaatcgatttacaaaccgaggaggaaatcttctaaaagaagaaaaacaacgagccaagctccagaaaatgctgcccaagctggaagaagagttgaaggcacgaattgaattgtgggaacaggaacattcaaaggcatttatggtgaatgggcagaaattcatggagtatgtggcagaacaatgggagatgcatcgattggagaaagagagagccaagcaggaaagacaactgaagaacaaaaaacagacagagacagagatgctgtatggcagcgctcctcgaacacctagcaagcggcgaggactggctcccaatacaccgggcaaagcacgtaagctgaacactaccaccatgtccaatgctacggccaatagtagcattcggcctatctttggagggacagtctaccactcccccgtgtctcgacttcctccttctggcagcaagccagtcgctgcttccacctgttcagggaagaaaacaccccgtactggcaggcatggagccaacaaggagaacctggagctcaacggcagcatcctgagtgcgagaactttcaaaggcttccaaatctgatgctacttctggaatcctcaattcaaccaacatccagtcctgagaagccctgatcagtcaaacag

SEQ ID NO: 1692 - DNA, 424 bp, Homo sapiens
accaaattgagattaaattgaagaaaagcaagcaaattaatttcagcttgattatcaacctgtatcaagaacaaaaatgggaggaggtgtccacatttatggtgtgtataggtaacatggggaaaatgctattctgtgttttggaaaagaagaaatagtgccgtcctatttatttctatatttagaaatttttctcaaagaaatttcaattgtatctatgagatgggtttctaagtatcttattgtgtgttataagtgccttttaatatcatactaagtgtgagcttctggacattttcaagagcttacaaaaactaagtggcattgtatttttataaccccattgagaagactaagtaagaaatgaaatgtcctatcaattttattttgtcatgcttcaaacaataaagacatttctgcttca

SEQ ID NO: 1693 - DNA, 2268 bp, Homo sapiens
tcgtttcctcccctcccctccactcggccgtccctccttcctcctccctcctccctcctcctcccgctcctgaagagcgcgccgcgtgggggacggcccggttacttcctccagagactgacgagtgcggtgtcgctccagctcagagctcccggagccgcccggccagcgtccggcctccctgatcgtctctggccggcgccctcgccctcgcccggcgcgcaccgagcagccgcgggcgccgagcagccaccgtcccgaccaagcgccggccctgcccgcagcggcaggatgaatgatttcggaatcaagaatatggaccaggtagcccctgtggctaacagttacagagggacactcaagcgccagccagcctttgacacctttgatgggtccctgtttgctgtttttccttctctaaatgaagagcaaacactgcaagaagtgccaacaggcttggattccatttctcatgactccgccaactgtgaattgcctttgttaaccccgtgcagcaaggctgtgatgagtcaagccttaaaagctaccttcagtggcttcaaaaaggaacagcggcgcctgggcattccaaagaacccctggctgtggagtgagcaacaggtatgccagtggcttctctgggccaccaatgagttcagtctggtgaacgtgaatctgcagaggttcggcatgaatggccagatgctgtgtaaccttggcaaggaacgctttctggagctggcacctgactttgtgggtgacattctctgggaacatctggagcaaatgatcaaagaaaaccaagaaaagacagaagatcaatatgaagaaaattcacacctcacctccgttcctcattggattaacagcaatacattaggttttggcacagagcaggcgccctatggaatgcagacacagaattaccccaaaggcggcctcctggacagcatgtgtccggcctccacacccagcgtactcagctctgagcaggagtttcagatgttccccaagtctcggctcagctccgtcagcgtcacctactgctctgtcagtcaggacttcccaggcagcaacttgaatttgctcaccaacaattctgggactcccaaagaccacgactcccctgagaacggtgcggacagcttcgagagctcagactccctcctccagtcctggaacagccagtcgtccttgctggatgtgcaacgggttccttccttcgagagcttcgaagatgactgcagccagtctctctgcctcaataagccaaccatgtctttcaaggattacatccaagagaggagtgacccagtggagcaaggcaaaccagttatacctgcagctgtgctggccggcttcacaggaagtggacctattcagctgtggcagtttctcctggagctgctatcagacaaatcctgccagtcattcatcagctggactggagacggatgggagtttaagctcgccgaccccgatgaggtggcccgccggtggggaaagaggaaaaataagcccaagatgaactacgagaagctgagccggggcttacgctactattacgacaagaacatcatccacaagacgtcggggaagcgctacgtgtaccgcttcgtgtgcgacctccagaacttgctggggttcacgcccgaggaactgcacgccatcctgggcgtccagcccgacacggaggactgaggtcgccgggaccaccctgagccggccccaggctcgtggactgagtgggaagcccatcctgaccagctgctccgaggacccaggaaaggcaggattgaaaatgtccaggaaagtggccaagaagcagtggccttattgcatcccaaaccacgcctcttgaccaggctgcctcccttgtggcagcaacggcacagctaattctactcacagtgcttttaagtgaaaatggtcgagaaagaggcaccaggaagccgtcctggcgcctggcagtccgtgggacgggatggttctggctgtttgagattctcaaaggagcgagcatgtcgtggacacacacagactatttttagattttcttttgccttttgcaaccaggaacagcaaatgcaaaaactctttgagagggtaggagggtgggaaggaaacaaccatgtcatttcagaagttagtttgtatatattattataatcttataattgttctcagaatcccttaacagttgtatttaacagaaattgtatattgtaatttaaaataattatataactgtatttgaaataagaattc

SEQ ID NO: 1694 - DNA, 384 bp, Homo sapiens
ctgcaggtataactggtttgccttgctccaccgggtcactcctctcttggatgtaatccttgaaagacatggttggcttattgaggcagagagactggctgcagtcatcttcgaagctctcgaaggaaggaacccgttgcacatccagcaaggacgactggctgttccaggactggaggagggagtctgagctctcgaagctgtccgcaccgttctcaggggagtcgtggtctttgggcgtcccagaattgttggtgagcaaattcaagttgctgcctgggaagtcctgactgacagagcagtaggtgacgctgacggagctgagccgagacttggggaacatctgaaactcctgctcagagctgagtacgctgggtgtggagg

SEQ ID NO: 1695 - DNA, 581 bp, Homo sapiens
  misc_feature 556: n = A,T,C or G
cctgctgggctwggcracgagggactcggcctcggaggcgacccagaccacacagacactgggtcaaggagtaagcagaggataaacaactggaaggagagcaagcacaaagtcatcatggcttcagcgtctgctcstggaaaccaagataaagatgcccattttccaccaccaagcaagcagagcctgttgttttgtccaaaatcaaaactgcacatccacagagcagagatctcaaagattatgcgagaatgtcaggaagaaagtttctggaagagagctctgcctttttctcttgtaagcatgcttgtcacccagggactagtctaccaaggttatttggcagctaattctagatttggatcattgcccaaagttgcacttgctggtctcttgggatttggccttggaaaggtatcatacataggagtatgccagagtaaattccatttttttgaagatcagctccgtggggctggttttggtccacagcataacaggcactgcctccttacctgtgaggaatgcaaaataaagcatggattaaagtgagaanggagactctcagccttcagcttcct

SEQ ID NO: 1696 - DNA, 3100 bp, Homo sapiens
ggtgggagccgccgtgtgtggagaagctgctgccggtgtcatggcggagctgagtgaggaggcgctgctgtcagtattaccgacgatccgggtccctaaggctggagaccgggtccacaaagacgagtgcgccttctccttcgacacgccggagtctgaggggggcctctacatctgtatgaacacgtttctgggctttgggaaacagtatgtggagagacatttcaataagaccggccagcgagtctacttgcacctccggcggacccggcgcccgaaagaggaggaccctgctacaggcactggagacccaccccggaagaagcccacgcggctggctattggtgttgaaggcggatttgaccttagcgaggagaagtttgaattagacgaggatgtgaagattgtcattttgccagattacctggagattgcccgggatggactggggggactgcctgacattgtcagagatcgggtgaccagtgcagtggaggccctactgtcggccgactcagcctcccgcaagcaggaggtgcaggcatgggatggggaagtacggcaggtgtctaagcatgccttcagcctcaagcagttggacaaccctgctcgaatccctccctgtggctggaagtgctccaagtgtgacatgagagagaacctgtggctcaacctgactgatggctccatcctctgtgggcgacgctacttcgatggcagtgggggcaacaaccacgctgtggagcactaccgagagacaggctacccgttagctgtcaagctgggcaccatcacccctgatggagctgacgtgtactcatatgatgaggatgacatggtcctggaccccagcctggctgagcacctgtcccacttcggcatcgacatgctgaagatgcagaagacagacaagacgatgactgagttggagatagacatgaaccagcggattggtgaatgggagctgatccaggagtcaggtgtgccactcaagcccctgtttgggcctggctacacaggcatccggaacctgggtaacagctgctacctcaactctgtggtccaggtgctcttcagcatccctgacttccagaggaagtatgtggataagctggagaagatcttccagaatgccccgacggaccctacccaggatttcagcacccaggtggccaagctgggccatggccttctctccggggagtattccaagccagtaccggagtcgggcgatggggagcgggtgccagaacagaaggaagttcaagatggcattgcccctcggatgttcaaggccctcatcggcaagggccaccctgaattctccaccaaccggcagcaggatgcccaggagttcttccttcaccttatcaacatggtggagaggaattgccggagctctgaaaatcctaatgaagtgttccgcttcttggtggaggaaaagatcaagtgcctggccacagagaaggtgaagtacacccagcgagttgactacatcatgcagctgcctgtgcccatggatgcagcccttaacaaagaggagcttctggagtacgaggagaagaagcggcaagccgaagaggagaagatggcactgccagaactggttcgggcccaggtgcccttcagctcttgcctggaggcctacggggcccctgagcaggtcgatgacttctggagcacggccctgcaggccaagtcagtagctgtcaagaccacacgatttgcctcattccctgactacctggtcatccagatcaagaagttcaccttcggcttagactgggtgcccaagaaactggatgtgtccatcgagatgccagaggagctcgacatctcccagttgaggggcacagggctgcagcccggagaggaggagctgccagacattgccccacccctggtcactccggatgagcccaaagcgcccatgctggatgaatcagtcatcatccagctggtggagatgggattccctatggacgcctgccgcaaagctgtctactacacgggcaacagcggggctgaggccgccatgaactgggtcatgtcacacatggatgatccagattttgcaaaccccctcatcctgcctggctctagtgggccgggctccacaagcgcagcagccgacccccctcctgaggactgtgtgaccaccattgtctccatgggcttctcccgggaccaggccttgaaagcgctgcgggccacgaacaatagtttagaacgggctgtggactggatcttcagtcacattgacgacctggatgctgaagctgccatggacatctcagagggccgctcagctgccgactccatctctgagtctgtgccagtgggacctaaagtccgggatggtcctggaaagtatcagctctttgccttcattagtcacatgggcacctctaccatgtgtggtcactacgtctgccacatcaagaaagaaggcagatgggtgatctacaatgaccagaaagtgtgtgcctccgagaagccgcccaaggacctgggctacatctacttctaccagagagtggccagctaagagcctgcctcaccccttaccaatgagggcaggggaagaccacctggcatgagggagaggggctgagggatggacttcagcccctctgctctgtaccctttttccttttgtccccggcagcagggaagaagctggaggccgtgggagaatggctgggcagagcagaggggcagcgatagactctggggatggagcaggacggggacgggaggggccggccacctgtctgtaaggagactttgttgcttcccctgcccccggaatccacagtgctctgcttctctgtgtcgccccgcccagccccctggtgtggagggaggggtctcgtttgtgcgcgtgggtgtagctttgtgcatcctctcccagtggagcgatcacctgtgcctcccctccccctttgtttgcccctgtgtggttggtcaaggagggatgtgagggaaatagggaccccccgacttgccctcctgcctcagtctttcccccaccctgtctcttccttgtccttctctggaaaatgccaaaatacacgatgtgaataaaagtacaacggct

SEQ ID NO: 1697 - DNA, 200 bp, Homo sapiens
ctgggagatgtcgagctcctctggcatctcgatggacacatccagtttcttgggcacccagtctaagccgaaggtgaacttcttgatctggatgaccaggtagtcagggaatgaggcaaatcgtgtggtcttgacagctactgacttggcctgcagggccgtgctccagaagtcatcgacctgctcaggggccccgtagg

SEQ ID NO: 1698 - DNA, 462 bp, Homo sapiens
cctgacattcctgccttcttatattaataagamaaataaaacaaaatagtgttgaagtgttggggcrgcgaaaatttttggggggtggtatggagagakaatgggcgatgtttctcagggctgcttcaagcgggattaggggcggcgtgggaacctagagtgggagagattaagctgaagggaggtcttgtggtaaggggtgatattrtggggatgttagaagaaacatttgtcgtatagaatgattggtgatggcctggatacggttttgkatgaattgagaarctaaatggaataagcagaaggagaraaacaggtataaaaggtctaagaattgggaggacctaggayatctgattagagagtgcctaaggagattcrgcatagtcctgccagcaaagattatttatttacttcaagagttwagagtggcagtttggggatagcaccaggagatatcag

SEQ ID NO: 1699 - DNA, 1752 bp, Homo sapiens
ccgctccttctaggatctccgcctggttcggcccgcctgcctccactcctgcctctaccatgtccatcagggtgacccagaagtcctacaaggtgtccacctctggcccccgggccttcagcagccgctcctacacgagtgggcccggttcccgcatcagctcctcgagcttctcccgagtgggcagcagcaactttcgcggtggcctgggcggcggctatggtggggccagcggcatgggaggcatcaccgcagttacggtcaaccagagcctgctgagcccccttgtcctggaggtggaccccaacatccaggccgtgcgcacccaggagaaggagcagatcaagaccctcaacaacaagtttgcctccttcatagacaaggtacggttcctggagcagcagaacaagatgctggagaccaagtggagcctcctgcagcagcagaagacggctcgaagcaacatggacaacatgttcgagagctacatcaacaaccttaggcggcagctggagactctgggccaggagaagctgaagctggaggcggagcttggcaacatgcaggggctggtggaggacttcaagaacaagtatgaggatgagatcaataagcgtacagagatggagaacgaatttgtcctcatcaagaaggatgtggatgaagcttacatgaacaaggtagagctggagtctcgcctggaagggctgaccgacgagatcaacttcctcaggcagctatatgaagaggagatccgggagctgcagtcccagatctcggacacatctgtggtgctgtccatggacaacagccgctccctggacatggacagcatcattgctgaggtcaaggcacagtacgaggatattgccaaccgcagccgggctgaggctgagagcatgtaccagatcaagtatgaggagctgcagagcctggctgggaagcacggggatgacctgcggcgcacaaagactgagatctctgagatgaaccggaacatcagccggctccaggctgagattgagggcctcaaaggccagagggcttccctggaggccgccattgcagatgccgagcagcgtggagagctggccattaaggatgccaacgccaagttgtccgagctggaggccgccctgcagcgggccaagcaggacatggcgcggcagctgcgtgagtaccaggagctgatgaacgtcaagctggccctggacatcgagatcgccacctacaggaagctgctggagggcgaggagagccggctggagtctgggatgcagaacatgagtattcatacgaagaccaccagcggctatgcaggtggtctgagctcggcctatgggggcctcacaagccccggcctcagctacagcctgggctccagctttggctctggcgcgggctccagctccttcagccgcaccagctcctccagggccgtggttgtgaagaagatcgagacacgtgatgggaagctggtgtctgagtcctctgacgtcctgcccaagtgaacagctgcggcagcccctcccagcctacccctcctgcgctgccccagagcctgggaaggaggccgctatgcagggtagcactgggaacaggagacccacctgaggctcagccctagccctcagcccacctggggagtttactacctggggaccccccttgcccatgcctccagctacaaaacaattcaattgctttttttttttggtccaaaataaaacctcagctagctctgccaatgtc

SEQ ID NO: 1700 - DNA, 228 bp, Homo sapiens; identical to SEQ ID NO: 229

SEQ ID NO: 1701 - DNA, 515 bp, Homo sapiens
ggcacgaggagctggcctccggggcaccgaccgctataaggccagtcggactgcgacacagcccatcccctcgaccgctcgcgtcgcatttggccgcctccctaccgctccaagcccagccctcagccatggcatgccccctggatcaggccattggcctcctcgtggccatcttccacaagtactccggcagggagggtgacaagcacaccctgagcaagaaggagctgaaggagctgatccagaaggagctcaccattggctcgaagctgcaggatgctgaaattgcaaggctgatggaagacttggaccggaacaaggaccaggaggtgaacttccaggagtatgtcaccttcctgggggccttggctttgatctacaatgaagccctcaagggctgaaaataaatagggaagatggagacaccctctgggggtcctctctgagtcaaatccagtggtgggtaattgtacaataaattttttttggtcaaatttaaaaaaaaaaaaaaaaaa

SEQ ID NO: 1702 - DNA, 329 bp, Homo sapiens; identical to SEQ ID NO: 464

SEQ ID NO: 1703 - DNA, 1022 bp, Homo sapiens
cacccccacctgccagagctgatcctccctaggccctgcctaaccttgagttggcccccaatccctctggctgcagaagtccccttacccccaatgagaggaggggcaggaccagatcttttgagagctgagggttgagggcattgagccaacacacagatttgtcgcctctgtccccgaagacacctgcaccctccatgcggagccaagatggggaatggaactgaggaagattataactttgtcttcaaggtggtgctgatcggcgaatcaggtgtggggaagaccaatctactctcccgattcacgcgcaatgagttcagccacgacagccgcaccaccatcggggttgagttctccacccgcactgtgatgttgggcaccgctgctgtcaaggctcagatctgggacacagctggcctggagcggtaccgagccatcacctcggcgtactatcgtggtgcagtgggggccctcctggtgtttgacctaaccaagcaccagacctatgctgtggtggagcgatggctgaaggagctctatgaccatgctgaagccacgatcgtcgtcatgctcgtgggtaacaaaagtgacctcagccaggcccgggaagtgcccactgaggaggcccgaatgttcgctgaaaacaatggactgctcttcctggagacctcagccctggactctaccaatgttgagctagcctttgagactgtcctgaaagaaatctttgcgaaggtgtccaagcagagacagaacagcatccggaccaatgccatcactctgggcagtgcccaggctggacaggagcctggccctggggagaagagggcctgttgcatcagcctctgaccttggccagcaccacctgcccccactggctttttggtgccccttgtccccacttcagccccaggacctttccttgccctttggttccagatatcagactgttccctgttcacagcaccctcagggtcttaaggtcttcatgccctatcacaaatacctcttttatctgt

SEQ ID NO: 1704 - DNA, 439 bp, Homo sapiens
ctgaggaagattataactttgtcttcaagggtactatcgtggtgcagtgggggccctcctggtgtttgacctaaccaagcaccagacctatgctgtggtggagcgatggctgaaggagctctatgaccatgctgaagccacgatcgtcgtcatgctcgtgggtaacaaaagtgacctcagccaggcccgggaagtgcccactgaggaggcccgaatgttcgctgaaaacaatggactgctcttcccggagacctcagccctggactctaccaatgttgagctagcctttgagactgtcctgaaagaaatctttgcgaaggtgtccaagcagagacagaacagcatccggaccaatgccatcactctgggcagtgcccaggctggacaggagcctggccctggggagaagagggcctgttgcatcagcctmtgaccttgg

SEQ ID NO: 1705 - DNA, 319 bp, Homo sapiens
  misc_feature 224, 258, 294, 296, 304: n = A,T,C or G
tcaaaacctcactatttaatggagtgcctttgtctctacttgaattgcgttttttccttgagacccagtgaagggaatcccccatcccagggtgtttttctttccgatcttttcccagcaggaacctttaaaagcttcctccagtggaatgccttaggggtcctcccatttctgagacagaaacatggttgatctcccttactctcctgcaatttatggcttgntccacacatgagaaatgactcacatttcctttgngcagtcagcaacagatttatgcatttccctttttgntntcatcctnttatcttgacttcca

SEQ ID NO: 1706 - DNA, 318 bp, Homo sapiens
  misc_feature 207, 224, 229: n = A,T,C or G
tcaaaacctcactatttaatggagtgcctttgtctctacttgaattgcgttttttccttgagacccagtgcagggaatcccccatcccagggtgtttttctttccgatcttttcccagcaggaacctttaaaagcttcctccagtggaatgccttaggggtcctcccatttctgagacagaaacatggttgatctcccttactctcntgcaatttatggcttgntccanacatgagaaatgactcacatttcctttgggcagtcagcagcagatttatgcatttccctttttgttctcatcctcttatcttgacttcc

SEQ ID NO: 1707 - DNA, 307 bp, Homo sapiens
  misc_feature 160, 210, 231, 240, 241, 252, 285: n = A,T,C or G
atggtgacatagtgggggatggcgtggtccaggccccgctcacacctgagagaggaaaaccaaagtcattcttctcaaaagcaaagttttggctaaaagacatctacttatctggaagtcaagataagaggatgagaacaaaaagggaaatgcataaatntgctgctgactgcccaaaggaaatgtgagtcatttctcatgtctggaacnagccatgaattgcaggaaaanaagggaaannaaccatgtttntgtctcagaaatgggaggacccctaaggcattncactggaggaagcttttaaagg

SEQ ID NO: 1708 - DNA, 484 bp, Homo sapiens
  misc_feature 210, 216, 441, 481: n = A,T,C or G
atcttgtaaggcaaatgattagcacacggcaggctcttcgtccgtttgcaagttgctgtttgtttccagctacaccagtcagagctccacagagagggtgcgttcctggttctcaggtgggcaggtgctatggtgcggggcgctggaaagaatggggttgaattggccctcgcctccgcttgtttgagactctcgttagaaagggcttangaaaancaagggaatggcagccaccccatcaccatcgagaacaggcagacgtttcccgagtaggggccaaagccactggaaaccgtgttccctgtgcagtccgactgacactaccccatgcctggggggaatgagtataaaaagggaaatgtttttgaagacaggcacgatatatactactagagaatgcgcagtttcaaaccacagttgcaggaggatataggaataacnacaggtgccggggactacgtacatcttggatagtcgacgncgg

SEQ ID NO: 1709 - DNA, 1168 bp, Homo sapiens
ggccgggagagtagcagtgccttggaccccaggtgagctggcctctcaggctccatctggcctgagcaccctgccccagcgagtcctccggaaagagcctgtcaccccatctgcacttgtcctcatgagccgctccaatgtccagcccacagctgcccctggccagaaggtgatggagaatagcagtgggacacccgacatcttaacgcggcacttcacaattgatgactttgagattgggcgtcctctgggcaaaggcaagtttggaaacgtgtacttggctcgggagaagaaaagccatttcatcgtggcgctcaaggtcctcttcaagtcccagatagagaaggagggcgtggagcatcagctgcgcagagagatcgaaatccaggcccacctgcaccatcccaacatcctgcgtctctacaactatttttatgaccggaggaggatctacttgattctagagtatgccccccgcggggagctctacaaggagctgcagaagagctgcacatttgacgagcagcgaacagccacgatcatggaggagttggcagatgctctaatgtactgccatgggaagaaggtgattcacagagacataaagccagaaaatctgctcttagggctcaagggagagctgaagattgctgacttcggctggtctgtgcatgcgccctccctgaggaggaagacaatgtgtggcaccctggactacctgcccccagagatgattgaggggcgcatgcacaatgagaaggtggatctgtggtgcattggagtgctttgctatgagctgctggtggggaacccaccctttgagagtgcatcacacaacgagacctatcgccgcatcgtcaaggtggacctaaagttccccgcttccgtgcccatgggagcccaggacctcatctccaaactgctcaggcataacccctcggaacggctgcccctggcccaggtctcagcccacccttgggtccgggccaactctcggagggtgctgcctccctctgcccttcaatctgtcgcctgatggtccctgtcattcactcgggtgcgtgtgtttgtatgtctgtgtatgtataggggaaagaagggatccctaactgttcccttatctgtaatctacctcctcctttgtttaataaaggctgaagctttttgt

SEQ ID NO: 1710 - DNA, 424 bp, Homo sapiens
  misc_feature 286, 304, 310, 317: n = A,T,C or G
tgccatgggaagaaggtgattcacagagacataaagccagaaaatctgctcttagggctcaagggagagctgaagattgctgacttcggctggtctgtgcatgcgccctccctgaggaggaagacaatgtgtggcaccctggactacctgcccccagagatgattgaggggcgcatgcacagtgagaaggtggatctgtggtgcattggagtgctttgctatgagctgctggtggggaacccaccctttgagagtgcatcacacaacgagacctatcgccgcatcntcaaggtggacctaaagntccccncttccgngcccatgggagcccaggacctcatctccaaactgctcaggcataacccctgggaacggctgcccctggcccaggtctcagcccacccttgggtccgggccaactctc

SEQ ID NO: 1711 - DNA, 2302 bp, Homo sapiens
gtgactgtggagtttgaattgggtggcggttgactgtagagccgctctctctcactggcacagcgaggttttgctcagcccttgtctcgggaccgcagcctccgccgagcgccatggctcctaggaagggcagtagtcgggtggccaagaccaactccttacggaggcggaagctcgcctcctttctgaaagacttcgaccgtgaagtggaaatacgaatcaagcaaattgagtcagacaggcagaacctcctcaaggaggtggataacctctacaacatcgagatcctgcggctccccaaggctctgcgcgagatgaactggcttgactacttcgcccttggaggaaacaaacaggccctggaagaggcggcaacagctgacctggatatcaccgaaataaacaaactaacagcagaagctattcagacacccctgaaatctgccaaaacacgaaaggtaatacaggtagatgaaatgatagtggaagaggaagaagaagaagaaaatgaacgtaagaatcttcaaactgcaagagtcaaaaggtgtcctccatccaagaagagaactcagtccatacaaggaaaaggaaaagggaaaaggtcaagccgtgctaacactgttaccccagccgtgggccgattggaggtgtccatggtcaaaccaactccaggcctgacacccaggtttgactcaagggtcttcaagacccctggcctgcgtactccagcagcaggagagcggatttacaacatctcagggaatggcagccctcttgctgacagcaaagagatcttcctcactgtgccagtgggcggcggagagagcctgcgattattggccagtgacttgcagaggcacagtattgcccagctggatccagaggccttgggaaacattaagaagctctccaaccgtctcgcccaaatctgcagcagcatacggacccacaaatgagacaccaaagttgacaggatggacttttaatgggcacttctgggaccctgaagagacttcttcccttcaggcttattgtttgagtgtgaagttccagagcaaggagccatgttcctctaagggaattcaggaattcagacgtgctagtcccacaccagttaggtagagctgtctgttcaccctcccatcccagctgatcccagtcactgcttgctggggccatgccatggaagcttcccatcagtctcccagctgaatcctccctgctctctgagctgctgccttttgcctcctgcaactcaacatcctcttcaccctgccctgcctgcagttgagggggcgaagaagaaccctgtgttctcaggaagactgcctccaccaccgctacccagagaacctctgcatctggcatttctgctctctatgcttgagaccgggaggtttaggctcagataagtgagctctgggccatgagagggtaggtccagaaggtggggggaactgtacagatcagcagagcaggacagttggcagcagtgacctcagtagggaacatgtccgtctaccctctcgcactcatgacacctccccctaccagccctcctcttcctcctcctcctcctcctgtgggaggtggtcagtgggacttagggatctttcacctgctgtgcccagtagttctgaagtctgcttgtggagcagtgttttatgtttatccctgtttactgaagaccaaatactggtttggagacaacttccatgtcttgctcttctacctccctagttagtggaaatttggataagggaactgtagggcccagattctggaggttttatgtcattggccacagaataactgtctctaagctatccatggtccagtggtccctgccaagtctgtagacttcagagagcacttctctcttatggggttcatgggaacaggggtgggtgtgacttgcttggtggcctcattccatgtgtgcctgtgcctggggcatggactttgttaagcagagtcagcagtgaggtcctcattctccagccagcctctctgccctggagaatcatgtgctatgttctaagaatttgagaactagagtcctcatccccaggcttgaaggcacatggctttctcatgtagggctctctgtggtatttgttattattttgcaacaagaccattttagtaaaacagtcctgttcaagttgtattcttttaagttcttttattctcctttccctgagatttttgtatatattgttctgagtaatggtatctttgagctgattgttctaatcagagctggtacctactttcaataaattctggttttgtgttttct

SEQ ID NO: 1712 - DNA, 349 bp, Homo sapiens
  misc_feature 329: n = A,T,C or G
tccagcagcaggagagcggatttacaacatctcagggaatggcagccctcttgctgacagcaaagagatcttcctcactgtgccagtgggcggcggagagagcctgcgattattggccagtgacttgcagaggcacagtattgcccagctggatccagaggccttgggaaacattaagaagctctccaaccgtctcgcccaaatctgcagcagcatacggacccacaaatgagacaccaaagttgacaggatggacttttaatgggcacttctgggaccctgaagagacttcttcccttcaggcttattgtttgagtgtgaagttccanagcaaggagccatgttcctc

SEQ ID NO: 1713 - DNA, 396 bp, Homo sapiens
  misc_feature 253, 325, 330, 337, 365, 387: n = A,T,C or G
ttaaaaaaggaacaacaaaaaactagggttgtagaattataaaactgcttcaaccttagaaccttaagtaggaggccctcaaatggacttacgttagtccttagggagtcaatgcgtgtgttgctgcttatttaaatacagttcagttggagccccgagagtgccaatgttttccccacacctcttggatgccttcctcttcccaaaccccagaagaggtgggcacctgagcggggaatctcaggtgacttantttgccagtgcctactctattgaagaactgggttttcatgctcgagaagaaactcgtggaagggcgtgtttnccatnacaggtncacatgctgattgcttttgttgaatttncttggtgcgacttatgccaagnaattatgac

SEQ ID NO: 1714 - DNA, 5791 bp, Homo sapiens
gggaagagcacacacaatgaagaccaagccagctgtgaggtgctcactgtgaagaagaaggcaggggccgtgacctcaaccccaaacaggaactcatccaagagacggtcctcccttcccaatggggaagggctgcagctgaaggagaactcggaatccgagggtgtttcctgccactattggtcgctgtttgacgggcacgcggggtccggggccgcggtggtggcgtcacgcctgctgcagcaccacatcacggagcagctgcaggacatcgtggacatcctgaagaactccgccgtcctgccccctacctgcctgggggaggagcctgagaacacgcccgccaacagccggactctgacccgggcagcctccctgcgcggaggggtgggggccccgggctcccccagcacgccccccacacgcttctttaccgagaagaagattccccatgagtgcctggtcatcggagcgcttgaaagtgcattcaaggaaatggacctacagatagaacgagagaggagttcatataatatatctggtggctgcacggccctcattgtgatttgccttttggggaagctgtatgttgcaaatgctggggatagcagggccataatcatcagaaatggagaaattatccccatgtcttcagaatttacccccgagacggagcgccagcgacttcagtacctggcattcatgcagcctcacttgctgggaaatgagttcacacatttggagtttccaaggagagtacagagaaaggagcttggaaagaagatgctctacagggactttaatatgacaggctgggcatacaaaaccattgaggatgaggacttgaagttcccccttatatatggagaaggcaagaaggcccgggtaatggcaactattggagtgaccaggggacttggggaccatgacctgaaggtgcatgactccaacatctacattaaaccattcctgtcttcagctccagaggtaagaatctacgatctttcaaaatatgatcatggatcagatgatgtgctgatcttggccactgatggactctgggacgttttatcaaatgaagaagtagcagaagcaatcactcagtttcttcctaactgtgatccagatgatcctcacaggtacacactggcagctcaggacctggtgatgcgtgcccggggtgtgctgaaggacagaggatggcggatatctaatgaccgactgggctcaggagacgacatttctgtatatgtcattcctttaatacatggaaacaagctgtcatgaaaatggcccaggggattgggaggacagaggggaagaaagctgggatgcctcttggcaggacggaactgggaagtgccccagctgagttccaagtgatgcagtctcttcccagcccaagcggggagttcatggccaaaagactatgcttcaagatgaccctttggtttccatttcttctttagtaacaggtcaactcaacaagagcaaaacacaaaggctgctaccaagtgttgttgtatttcagttcctttcataggcctccgaggtggccattgactatttggggtatatatgtcatatttattttatctagagtagctggggcagccattttcaggtgtaaatggcagaggactcttcagcctgtcaagctgccagcttatctacgggttaaaaagtgctgcattggaaagtagggggtcatgcctcaaaatgtaagtaagtgcccaccttctaggaagcctgaggtttatttcagggattgccgtctgccccccgccccccttctctttttttcttctctgtttctattcttttatggcagtggtggagtgaggcagggattttttttttttttttttcgtgtttttgacattccttgaatctgttttttattccccttccacagaacaggcctgggactttccaacaccctgctaaggaagttctgtgtccaagtcccacccaggctgggttgtccccacctcctccagcccacacagcccaggcagcatccgggccagtgccctgcatgacagagggtctttgttgtgtaatgtttgttcccaagttgcattttctaaccgaatcagtgtgttttcatgaaactgagtgtttctgtggaccagtagttcctctgttgtcttcagtggtcttcctgtgtggctcaagggttctctgtgagagtctggattttcatttctggaatggctggccccatcccacttttctgtatcatggggacacatataaagcagtgtttaatagagcagtttaagaagttgcttgcatctgttggttcaccatggctcatctggggaccattttggattcatgtttcatggcttgtgactgtccccaagcccactccaaacaaagtgtaaggatcagagttctgtcaaggagcagcagttctgctctccccatcatctttgtgcaaggcccctcggggggcactttaataaaagaatttgaaatgggttgactggccattctcatgctgtgctccctgtctcttctcttctctaaagaatcatgtcccagctcctcaaggtccctctatggttccacatctgagtgttcgccacaagagcagcagcagcaggcacagtgcatgccatatctacctgctgcttctctgctgggaggaatggccaagtagattataaaactcacttctgtctcttaggcagacttgtacggccacaaaattacctagtcttcttcctgctgagctactgaggtattgccaccattttgacaactttgagtaattaaaacactcttctgacccaaaaaggaaaaaaggtcactgacgtgacccccccagcatgctagagagctaattccagttctcatatttgtttgaatttcttcccagaggagaggataggaacctctcctccagggcagtaaatcacctgcatttctggagttgtcggtattgtattcgaaaaggcctggagcccctcctgctcaggaaagaactcattccagggtgtggagacagtgccgtctggcaggtgaaatactgtgggaattcacgccaccaggtgtttgtgcaagtgttggcctgggaagaatgggacttcggccttgtcaggagttgtcttcatctgcagcacgtttcttcctcctgcagtagatcttagctaccccagatatctctatggagagaagtttgtggaaaatgctttgcttcgtggcagagtctgatgctgtaggaaaaccttcgggcatgtgacagcagtgtggtccactccctgttctgccctggcgctcagagtcatgtgtaagtaggaaacctgagcaagtcttccgtggaggaccctgagctgccgtctttgggatccttcctgtgtccccaccgtctttcatttatttgctttcctgggcctctatctgggccctaccttgagcttctccagttttattcaagccaccagagtaagaatttgggtgtagatgtcacaactaccttctactcaattcaccaattcatttactgctatggcacgtctcaggaataactctagaaacctctaaatcgaaatattataaaatcttgagcacttagtcctgctggttttagttagaaaggcatccaggaattgttttcctacgcccccttgagtggaaagatcttagttagaagataaagtcaagtttgtgttcaggggatgggaggaagactataaataagatgaagaaatcaaaagtaggaaacatgatgtaaacgaagcatggcagatctgtccagcactgatattgctctataaattgagcttactcagttttggccttatttttttacccaggccccatgtcacccagtcctaaaacagtaaccgtgtctacataacgggttggcccctggtgcatccctggaaaagtcaaaggacgcacacttcgaaattctgcagaacgtatttatacatggttcagaaatcttgcgtatctgacttatagccaaatctgcttgctcgaatagcctcagaggaagtcttgtttaataaaaaccttttgatttcctagtcaagtctttatggttgtctcgaggggtgtgtggctactttaatgaaaggctttcctgctctaaatctctttgctgggctgggcctcttcagactatctggtgaaactcctttccttagaacaaactcagtccgtccatgctctgtggcattttgctagatgataaccaaagccttattcctgtagccagtgtcagcagtcagagaggtggagggtgtgttctgctgtggttatgcatacctatctgctgttcttgaggtgtaaaaggaaaggtgaaaatcgggccaggccaagtactcagctgtcttaataggatgaagccttaagcagtggaaatttcagttattttccacagtattccattttggaggatttggggtgtttactttttaaattcttgaacaacttaacctccatgaggctttgtgaagtcagctgtgaccaccctcctcttactgtgttctcagtattcattcacttccagggaagaatgacagccacagggagatggtggtgggcaagaatgagagtcccaggatccagatttagcctcagatcttccccattcaggaagggttttccatttaacaagagcactagtatgaaaacattagggacaaatctcccatgtctttgaaattcggattctcctcttgagatccccttcctcacctgccaatcaactttataaggccacaagtggtcactggttttccttccacaggtttgaggttctcagctttccttaagcgacccagcagctccgctgttttcagagtgaatatgttaagctttgatgagattctattttcagtaagttagtgcttctgggacacttggagaaagctgtgagagtcattgtctacgcaaagaacaacgaagctgatcctaaaagtgatccaatctaagaaaatggtaaaacgagctctggccacagcacagaattttatgtgaggaactcagatttttgaagacttaacaattgcagagaaaggttgcagcctgcacaccatagcccacctctctgagcagactttggttttgtgtggtgacgtggcacatgtttgtacactgggatttttcaaaggacgctacgcgagcagactgacttgcctcttctgtgagcactgtggcttttgtcagatggagtgccggtctgcagaggactgctctttcgaatccacagtgttatctgtgtaaatagctttaatttttcttctgtgtcttaggtgaagttttgttcatgtagcaaccaggtagacagtgaccaaataaggctgtaaatgtgctgtagttttctactgtgatgtacttgaaggagaacctgtgtcctctacttttctgatctcccacaagtattttgtgtttgtttcctgagtcctgaggttattattttactcctgttttgcccccagttttctttgttttttttctggagacccagggaggcccatggtggagatcatttgtaaggaatggatcatggtctgggtttccaaaactaccctagtacagtgaatgagagaaatctgcctggaaattgtttcagaaccatgtacctttatgctttgtgattgtgaaacattgacttttttgtaaccccaaaatgaaaactgtttagtaaaggggatctattttgtgtgttttgaaacttaggtgcaatgtcccctggaaaaagctaaagaaatgtatatgttcaatgacattttaaaataaaatattatatatatgtatatacgacatattcagc

SEQ ID NO: 1715 - DNA, 426 bp, Homo sapiens
  misc_feature 343, 344, 346, 370: n = A,T,C or G
tcagctgtcttaataggatgaagccttaagcagtggaaatttcagttattttccacagtattccattttggaggatttggggtgtttactttttaaattcttgaacaacttaacctccatgaggctttgtgaagtcagctgtgaccaccctcctcttactgtgttctcagtattcattcacttccagggaagaatgacagccacagggagatggtggtgggcaagaatgagagtcccaggatccagatttagcctcagatcttccccattcaggaagggttttccatttaacaagagcactagtatgaaaacattagggacaaatctcccatgtctttgaaanncngattctcctcttgagatccccttnctcacctgccaatcaactttataaggccacaagtgggcactggttttccttccaca

SEQ ID NO: 1716 - DNA, 2188 bp, Homo sapiens
gccgcgtgggggacggcccggttacttcctccagagactgacgagtgcggtgtcgctccagctcagagctcccggagccgcccggccagcgtccggcctccctgatcgtctctggccggcgccctcgccctcgcccggcgcgcaccgagcagccgcgggcgccgagcagccaccgtcccgaccaagcgccggccctgcccgcagcggcaggatgaatgatttcggaatcaagaatatggaccaggtagcccctgtggctaacagttacagagggacactcaagcgccagccagcctttgacacctttgatgggtccctgtttgctgtttttccttctctaaatgaagagcaaacactgcaagaagtgccaacaggcttggattccatttctcatgactccgccaactgtgaattgcctttgttaaccccgtgcagcaaggctgtgatgagtcaagccttaaaagctaccttcagtggcttcaaaaaggaacagcggcgcctgggcattccaaagaacccctggctgtggagtgagcaacaggtatgccagtggcttctctgggccaccaatgagttcagtctggtgaacgtgaatctgcagaggttcggcatgaatggccagatgctgtgtaaccttggcaaggaacgctttctggagctggcacctgactttgtgggtgacattctctgggaacatctggagcaaatgatcaaagaaaaccaagaaaagacagaagatcaatatgaagaaaattcacacctcacctccgttcctcattggattaacagcaatacattaggttttggcacagagcaggcgccctatggaatgcagacacagaattaccccaaaggcggcctcctggacagcatgtgtccggcctccacacccagcgtactcagctctgagcaggagtttcagatgttccccaagtctcggctcagctccgtcagcgtcacctactgctctgtcagtcaggacttcccaggcagcaacttgaatttgctcaccaacaattctgggactcccaaagaccacgactcccctgagaacggtgcggacagcttcgagagctcagactccctcctccagtcctggaacagccagtcgtccttgctggatgtgcaacgggttccttccttcgagagcttcgaagatgactgcagccagtctctctgcctcaataagccaaccatgtctttcaaggattacatccaagagaggagtgacccagtggagcaaggcaaaccagttatacctgcagctgtgctggccggcttcacaggaagtggacctattcagctgtggcagtttctcctggagctgctatcagacaaatcctgccagtcattcatcagctggactggagacggatgggagtttaagctcgccgaccccgatgaggtggcccgccggtggggaaagaggaaaaataagcccaagatgaactacgagaagctgagccggggcttacgctactattacgacaagaacatcatccacaagacgtcggggaagcgctacgtgtaccgcttcgtgtgcgacctccagaacttgctggggttcacgcccgaggaactgcacgccatcctgggcgtccagcccgacacggaggactgaggtcgccgggaccaccctgagccggccccaggctcgtggactgagtgggaagcccatcctgaccagctgctccgaggacccaggaaaggcaggattgaaaatgtccaggaaagtggccaagaagcagtggccttattgcatcccaaaccacgcctcttgaccaggctgcctcccttgtggcagcaacggcacagctaattctactcacagtgcttttaagtgaaaatggtcgagaaagaggcaccaggaagccgtcctggcgcctggcagtccgtgggacgggatggttctggctgtttgagattctcaaaggagcgagcatgtcgtggacacacacagactatttttagattttcttttgccttttgcaaccaggaacagcaaatgcaaaaactctttgagagggtaggagggtgggaaggaaacaaccatgtcatttcagaagttagtttgtatatattattataatcttataattgttctcagaatcccttaacagttgtatttaacagaaattgtatattgtaatttaaaataattatataactgtatttgaaataagaattc

SEQ ID NO: 1717 - DNA, 397 bp, Homo sapiens
  misc_feature 239, 288, 381: n = A,T,C or G
gcgggtgtggaggccggacacatgctgtccaggaggccgcctttggggtaattctgtgtctgcattccatagggcgcctgctctgtgccaaaacctaatgtattgctgttaatccaatgaggaacggaggtgaggtgtgaattttcttcatattgatcttctgtcttttcttggttttctttgatcatttgctccagatgttcccagagaatgtcacccacaaagtcaggtgccagctncagaaagcgttccttgccaaggttacacagcatctggccattcatgccnaacctctgcagattcacgttcaccagactgaactcattggtggcccaaacaagccactggcatacctgttgctcactccacagccaggggttntttggaatgcccaagc

SEQ ID NO: 1718 - DNA, 287 bp, Homo sapiens
  misc_feature 29, 215, 242, 257: n = A,T,C or G
gcgggtgtggaggccggacacatgctgtncaggaggccgcctttggggtaattctgtgtctgcattccatagggcgcctgctctgtgccaaaacctaatgtattgctgttaatccaatgagggacggaggtgaggtgtgaattttcttcatattgatcttctgtcttttcttggttttctttgatcatttgctccagatgttcccatagaatgtnacccacaaagtcaggtgccagcttcanaaagcgttccttgcnaaggttacacagcatctggccattcatgct

SEQ ID NO: 1719 - DNA, 482 bp, Homo sapiens
tcgacccggattccggttccggtgggctccatcagcaagctccagtgctacgtgtccctggcattttaggtgtcggttgggtaggcagtcatggatcaggtaatgcagtttgttgagccaagtcggcagtttgtaaaggactccattcggctggttaaaagatgcactaaacctgatagaaaagaattccagaagattgccatggcaacagcaataggatttgctataatgggattcattggcttctttgtgaaattgatccatattcctattaataacatcattgttggtggctgaatacattttggaagagagtttttcatcttagagattggtgaacaagtgtgagggtgtgagaaactcacagaatacaaatttgcctgtatgttttgtgggtttttttttttcctttcaagatgttttctatttctaaattaaagtaatttcaaaataaaaaaaaaaaaaaaaaaaaaaaaaaaaaa

SEQ ID NO: 1720 - DNA, 395 bp, Homo sapiens
  misc_feature 327, 342, 384: n = A,T,C or G
gcgggggattccggttccggtgggcctccatcagcaagctccagtgctacgtgtccctggcattttaggtgtcggttgggtaggcagtcgtggatcaggtaatgcagtttgttgagccaagtcggcagtttgtaaaggactccattcggctggttaaaagatgcactaaacctgatagaaaagaattccagaagattgccatggcaagagcaataggatttgctataatgggattcattggcttctttgtgaaattgatccatattcctattaataacatcattgttggtggctgaatacattttggaagagagtttttcatcttanagattggtgaacaantgtgagggtgtgagaaactcacagaatacaaatttgcctgtntgttttgtggg

SEQ ID NO: 1721 - DNA, 4497 bp, Homo sapiens
ctgcagccttgaactcctgggttcaactgaaggtcctcctacctcagcctgctgagtagctaggaccacaagcacacaccaccgcaactggcttaaattaaaatataaattgtagagatagggtcttaatgtgttgcccaggctgctcttgaactccttgcttcaggtgatcctcccacctcagcctctcaaagtgctgggattatagacctgagccacagcacctggccaactgacctatgattttacacaatggctgctcttcccttctttaactattattcattcttctttgatcctcattatttgactgtagtccttcttatgtcttgttttccttcattacctcttattctatcacattgccattgtcattctccactggggaagctctttcttgctgaagactggaaagacaagtccattcacctgattttctgtaagattgtggctcatgtattgacttgtcagacaattctgaagtttcatcaaaattagctatcatgcttgcataatggccctgaaccctcactcctacacttagcttcagtaccatctatgtcctcaactgtccatgatacttataattcccgtaaatcttcacttaacacctaacatttatttaatcttactaggcaaggtaataagaaatacataggtttgcctccagaagtgggttcttaagaaacccaccagaggaactcctctttcagatgtccacattagaagatttcatatcacatttggtgccacaggcctttgacaaggaggatgcagaggaaaaagcaaacttcacctcttcctagggaaagtgttggcctgccaacaggaaagaggcaacatctgggaaaatccccagtctttgccaggaagagtccatgccaaccccaccccatgacccctgtcctgcctactcattgtcactcttcactccaatgtccctcccccagatcctctataaaatcccactctttcctgaccagacaaaccataccatatcccaccagagaggtaagtgggagctgagagaagatgagacccagggaggagctactgcacatgacacaggagaatacatgggagggtcccttcctcagggagcacaggaactctgagactcagcaagggtgtcctgggagggctcggggatgggagagtacacagattcacaactcattcagaactgtagaagatgatggatgtgaccaagatcactttagtcctaggggactagagaaggaaaatgacatgaggcagtggggtatctgtgtgttctcccactgaccacgctttctttagtgactcctgattgcctcctcaagtcgcagacactatgctgcctcccatggccctgcccagtgtatcttggatgctgctttcctgcctcatgctgctgtctcaggttcaaggtgagattgctttgcctctagcactgggttccctatgaatcctcagagctaacaagaggaggaaggctcctgtgtgtcatgtgaggtaatgacgtggtgtctaatgaacctgcctgcagttcttgcatcatctctccttccttcaggttaacttgcagtgggaggctccatggtggtccactaacagtggaatgagatggcttccatttagtcagtggactctaatatacactggtgggaaagtggactctaatatacactggagggtcagtaatgagatgtggggagggacaatgattggaggacccaatgtagagacagcccagagtgaggagagtattgaatggttgaataaggggaaagggtaataagagactggatggtgctccatttactatggctattttgagataaagaatttctgaaaacataagggaagatgaaggggtgtcaggaatgtggtcttcctccccaaggacattcctaggtattccccaaggtcatctcccaccccaagccccactcttcattttaccctcccctctcttcttccacctcaggtgaagaaccccagagggaactgccctctgcacggatccgctgtcccaaaggctccaaggcctatggctcccactgctatgccttgtttttgtcaccaaaatcctggacagatgcagatgtgagtggttagatgtggtgttggaggtgaccggtctcagggggaggagggtctccattcaggagagttccttgggaatgaggatgaacacgtttatctttcacacagtcctcctcccacctacctttgccctgccctccctcagcaggtctcaggctccctctcattctctttgttgccctcaaagctggcctgccagaagcggccctctggaaacctggtgtctgtgctcagtggggctgagggatccttcgtgtcctccctggtgaagagcattggtaacagctactcatacgtctggattgggctccatgaccccacacaggtgccagtatatcctccctctctgttacctctcaaggtgctattgttgcccaggcccactccctgtcccctgtgcctgcccaggaagtacttcagggagcactggagctcagattctggggaatatttggggggaaagggaaggccatgaagcatctgaagatctgagttctgtggaggtctctatctttcagataaaatcaatctgccttcctcaggcgtattacataattctcatatgaggctgggttaacaattctctgagcttcatggagtctttgcctactattctgaaggaactcttaatgaagataggatcaatttttgtccccatacagaactgacattacttttgaggttcacaagctaatcacaaatgctacatcaattattgttctgcaaataatatattaccttgagttgttccaaaggtcttatgtttattggctggaattttccaatagcaatgaggagtcaaggaagagtttcctactcaccggcagcatctggaatagcagaccaactttcctcatgctggggagcaaatcaggtgttgcagctaaggggccatgcaagaagagctgcaatggccattcccttcacctggctacctcctctactctacagggcaccgagcccaatggagaaggttgggagtggagtagcagtgatgtgatgaattactttgcatgggagagaaatccctccaccatctcaagccccggccactgtgcgagcctgtcgagaagcacaggtaagaaacagaggagctgcctcttcccagtgttttccatctcatcccccattcctgggtctgaccttcaggaaatcttcctgagctagaaaatacaatgttagtgtgtcttctcttatctcctctcttctccactttctttgaatctctctcctggattgggacactggtgaaggtgagggagaggctttaacttctaggctaaaacctgggatgccccttcattggattcacaagcttcctcagccccattccatttatgtcttctgtctctccagcatttctgaggtggaaagattataactgtaatgtgaggttaccctatgtctgcaagttcactgactagtgcaggagggaagtcagcagcctgtgtttggtgtgcaactcatcatgggcatgagaccagtgtgaggactcaccctggaagagaatattcgcttaattcccccaacctgaccacctcattcttatctttcttctgtttcttcctccccgctgtcatttcagtctcttcattttgtcatacggcctaaggctttaaagagcaataaaatttttagtctgcacttgtttgtcttgtatatgccagtgtcatagccatactctgagaaggacaaagtgtttgagtggaggaaactttatgggtcttgcttcttccctattcacccaggcctctagggaaaatgatgaagtgtgcatccctaccagtgtgttatgatgagggtgtgggtcctgctcatgtaggatttgtgttgtggagagatgaggacatttctctcccgcgtacttactgccctcccattcccgtagcccaaacctgacagtgtgacatgaacagattaggaggctctgatggtgcttagaatagtacttctcagagaatggcatcagcaggatggtagataggactttccagctcttgaaccttcacagaaacattcatttgaactactacccattaaaatggaaataccttcacaagagctaacaatcccaagtgagtgattaaagcatctgaatgttgcaaaaaataagaagggatgcatcgaagagggtagaaagaagacttttacattatttatatcacccctccatcaatctcagtaagcacagcatggagagacattccctaaacttggggaaagagagtgaaataagcacttgagttttccatggaccctaacactaggtttgcctcagtaagacccagtggcctctgactccaggcagacacccttggacttagactccaggctgccttgatgccaggccaggctctgtggccccaggctctgtgaccccaggctccaggtcagcccccatgactgcag

SEQ ID NO: 1722 - DNA, 381 bp, Homo sapiens
gcgggggtgaagagcattggtaacagctactcatacgtctggattgggctccatgaccccacacagggcaccgagcccaatggagaaggttgggagtggagtagcagtgatgtgatgaattactttgcatgggagagaaatccctccaccatctcaagccccggccactgtgcgagcctgtcgagaagcacagcatttctgaggtggaaagattataactgtaatgtgaggttaccctatgtctgcaagttcactgactagtgcaggagggaagtcagcagcctgtgtttggtgtgcaactcatcatgggcatgagaccagtgtgaggactcaccctgggagagaatattcgcttaattcccccaacctgaccacctcatt

SEQ ID NO: 1723 - DNA, 494 bp, Homo sapiens
  misc_feature 264, 294, 400, 443, 450, 451, 467, 477: n = A,T,C or G
cctcaaaaatatttacaatgaagtaaatacactaacagaatttaaaacaggcacaaaatattgaaatgaccaacgttacatgatttcaagggttgtcctttctgtgcttttatctgtcacgacaggaaggtgtggaaagtttatatccttaatttgactactcttggatattaaaatctttctattaattaaaaagacttttagacaacctcttaaatggaattacactatggaaaacagggctcccccaaaaacacctaggcngaactgagagttctttgaaaaccattcccnataaaaactaaatgaaaaataaatataaaacaaagcttaaaaaaatatgcattacctgacaccaaccttttctggctgacaatatttattcatgaaaacatatcanctgtctaccttttatatgcaaaccaagtcctgaggttaactangggctgnngcaaactaacatttangatgcaaacnttcttggatttgtgatg

SEQ ID NO: 1724 - DNA, 498 bp, Homo sapiens
  misc_feature 414, 421, 473: n = A,T,C or G
cgacgtcgactatccaagatgtacaaaaaagaactacttgtattctagaagaaatatgaaatgcttaatttataagcgggctggagattttttccaatattgttttctttgaaaatgaaaggggatcatctattttagttttggggtctgggaactttttgaaaatttaatttgtggaccaatgtttttgtgaaagctaaagagggcaggggttaaaatagggcttgaatttctcattctgtatagaccagcaaacttccctgtgcaaggcaagtttacatcacaaatccaagaatgtttgcatcctaaatgctagtttgcttcagcccctagttaacctcaggacttggtttgcatataaaaggtagacagctgatatgttttcatgaataaatattgtcagccagaaaaggntggtgtnaggtaatgcatatttttttaagctttggtgtatatttatttttcatttaganttattgggaatggttttcaaagaac

SEQ ID NO: 1725 - DNA, 391 bp, Homo sapiens
  misc_feature 119, 147, 164, 212, 266, 362, 363, 382: n = A,T,C or G
ggggagacgggccccaaagccctccggctcaccccaggtgccctaaaccaccactcattttgctactgacatttcctcccgcaagtcccagcacctgcctccactcccacccattgcanatccaggcacagctcacctgtatcccancccctaatctctatgtncaagtgcaccctgatcactgattactgtgttctacatgcattccaaanagttacttcctacttgcccaggactgcagaccacctctgactagaacagaccancaagcgtctttgctatccaatgtgctgaactacaccttctccaataacatctgaactcttattgccttccttatgtacatcttggatagtcgacgnnggtaagggcgaattctgcngatatccat

SEQ ID NO: 1726 - DNA, 442 bp, Homo sapiens
  misc_feature 215: n = A,T,C or G
aaaagaatacaatatgatttgtcaaaaaacatataaaaagacagctgctcttcctcaaatacatgagctaatgataaaagactttttcatgttaatgtctccaagttcttctttttacataaaaaagaacattatggtggcaaatgtgaattatccttttaatattgaacattatattcttttaaaatccatccagatcaaatgcaataattttntttttaactcaacaactgatgctaccaaacgtggactcaatatacttgttaaaacgtgtaaagcgtgtctctagtcttcaaagctttcaggtgaagagaggtgctttttcttgatgcaaatctcaaggcagagaaaatcattttaaagcttataaaaagtggacagagaaatattaaaaacttctctgaaatatacaaatatgtgtaatttttaaaattgaagacag

SEQ ID NO: 1727 - DNA, 2348 bp, Homo sapiens
cacttttgataacctgagtcccggcctggagtacaatgtcagtgtttacactgtcaaggatgacaaggaaagtgtccctatctctgataccatcatcccagctgttcctcctcccactgacctgcgattcaccaacattggtccagacaccatgcgtgtcacctgggctccacccccatccattgatttaaccaacttcctggtgcgttactcacctgtgaaaaatgaggaagatgttgcagagttgtcaatttctccttcagacaatgcagtggtcttaacaaatctcctgcctggtacagaatatgtagtgagtgtctccagtgtctacgaacaacatgagagcacacctcttagaggaagacagaaaacaggtcttgattccccaactggcattgacttttctgatattactgccaactcttttactgtgcactggattgctcctcgagccaccatcactggctacaggatccgccatcatcccgagcacttcagtgggagacctcgagaagatcgggtgccccactctcggaattccatcaccctcaccaacctcactccaggcacagagtatgtggtcagcatcgttgctcttaatggcagagaggaaagtcccttattgattggccaacaatcaacagtttctgatgttccgagggacctggaagttgttgctgcgacccccaccagcctactgatcagctgggatgctcctgctgtcacagtgagatattacaggatcacttacggagaaacaggaggaaatagccctgtccaggagttcactgtgcctgggagcaagtctacagctaccatcagcggccttaaacctggagttgattataccatcactgtgtatgctgtcactggccgtggagacagccccgcaagcagcaagccaatttccattaattaccgaacagaaattgacaaaccatcccagatgcaagtgaccgatgttcaggacaacagcattagtgtcaagtggctgccttcaagttcccctgttactggttacagagtaaccaccactcccaaaaatggaccaggaccaacaaaaactaaaactgcaggtccagatcaaacagaaatgactattgaaggcttgcagcccacagtggagtatgtggttagtgtctatgctcagaatccaagcggagagagtcagcctctggttcagactgcagtaaccactattcctgcaccaactgacctgaagttcactcaggtcacacccacaagcctgagcgcccagtggacaccacccaatgttcagctcactggatatcgagtgcgggtgacccccaaggagaagaccggaccaatgaaagaaatcaaccttgctcctgacagctcatccgtggttgtatcaggacttatggtggccaccaaatatgaagtgagtgtctatgctcttaaggacactttgacaagcagaccagctcagggtgttgtcaccactctggagaatgtcagcccaccaagaagggctcgtgtgacagatgctactgagaccaccatcaccattagctggagaaccaagactgagacgatcactggcttccaagttgatgccgttccagccaatggccagactccaatccagagaaccatcaagccagatgtcagaagctacaccatcacaggtttacaaccaggcactgactacaagatctacctgtacaccttgaatgacaatgctcggagctcccctgtggtcatcgacgcctccactgccattgatgcaccatccaacctgcgtttcctggccaccacacccaattccttgctggtatcatggcagccgccacgtgccaggattaccggctacatcatcaagtatgagaagcctgggtctcctcccagagaagtggtccctcggccccgccctggtgtcacagaggctactattactggcctggaaccgggaaccgaatatacaatttatgtcattgccctgaagaataatcagaagagcgagcccctgattggaaggaaaaagacagttcaaaagacccctttcgtcacccaccctgggtatgacactggaaatggtattcagcttcctggcacttctggtcagcaacccagtgttgggcaacaaatgatctttgaggaacatggttttaggcggaccacaccgcccacaacggccacccccataaggcataggccaagaccatacccgccgaatgtaggacaagaagctctctctcagacaaccatctcatgggccccattccaggacacttctgagtacatcatttcatgtcatcctgttggcactgatgaagaacccttacagttcagggttcctggaacttctaccagtgccactctgacag

SEQ ID NO: 1728 - DNA, 411 bp, Homo sapiens
  misc_feature 238, 251, 318, 340, 358, 366, 372, 383: n = A,T,C or G
tcagaagtgtcctggaatggggcccatgagacggttgtctgagagagagcttcttgtcctgtctttttccttccaatcaggggctcgctcttctgattattcttcagggcaatgacataaattgtatattcggttcccggttccaggccagtaatagtagcctctgtgacaccagggcggggccgagggaccacttctctgggaggagacccaggcttctcatacttgatgatgtagncggtaatcctggnacgtggcggctgccatgataccagcaaggaattgggtgtggtggccaggaaacgcacgttggatggngcatcaatggcagtggaggcgncgatgaccacaggggagntccgagcnttgtcnttcaaggtgtncaggtagatcttgtagtctttgcctgga

SEQ ID NO: 1729 - DNA, 299 bp, Homo sapiens
  misc_feature 182, 269, 289, 291: n = A,T,C or G
cgcctgacagttgtcctgggactgcttgtcttattcctgacctgctatgcagacgacaaaccagacaagccagacgacaagccagacgactcgggcaaagacccaaagccagacttccccaaattcctaagcctcctgggcacagagatcattgagaatgcagtcgagttcatcctccgctncatgtccaggagcacgtaagcactgagaaaaacgttactttttgtccaattctctgttgataatgaccacacaatgacctcatggcnttaaaatacatgagaaacananaaaaaaaa

SEQ ID NO: 1730 - DNA, 430 bp, Homo sapiens
  misc_feature 273, 363, 374, 390, 413: n = A,T,C or G
ttcctggctagtcggtgtaaacgttgcaaaaccagtctgtgggtctaagagctaatgcgggcatggctgttgggatggaggacctgctgtggcttggtcctggtatcgaaagagtctggatttttagggctcatactatcctccgtggtcatgctccaataaattcactgctttgtggcgcgacccttaggtattctgcattttcagctgtggagcccttaaagatgccatttggcttggcttccttgggaaagaagtcctgctggtagtcanggttgtccaggctaatttggtggctgcctttctgggcccagtgggcagggctgtcgaatgtgctgttgacacaggtgggctggacagtgntgagatactcngggttgcccactgcantgctgtgggggtcctggtaatgngggtctctactgggcgc

SEQ ID NO: 1731 - DNA, 5264 bp, Homo sapiens
  misc_feature 2497: n = A,T,C or G
cttccagtttgccaaggcacgagtaacaagctcacgcagttgggcacttttgaagatcattttctcagcctccagaggatgttcaataactgtgaggtggtccttgggaatttggaaattacctatgtgcagaggaattatgatctttccttcttaaagaccatccaggaggtggctggttatgtcctcattgccctcaacacagtggagcgaattcctttggaaaacctgcagatcatcagaggaaatatgtactacgaaaattcctatgccttagcagtcttatctaactatgatgcaaataaaaccggactgaaggagctgcccatgagaaatttacaggaaatcctgcatggcgccgtgcggttcagcaacaaccctgccctgtgcaacgtggagagcatccagtggcgggacatagtcagcagtgactttctcagcaacatgtcgatggacttccagaaccacctgggcagctgccaaaagtgtgatccaagctgtcccaatgggagctgctggggtgcaggagaggagaactgccagaaactgaccaaaatcatctgtgcccagcagtgctccgggcgctgccgtggcaagtcccccagtgactgctgccacaaccagtgtgctgcaggctgcacaggcccccgggagagcgactgcctggtctgccgcaaattccgagacgaagccacgtgcaaggacacctgccccccactcatgctctacaaccccaccacgtaccagatggatgtgaaccccgagggcaaatacagctttggtgccacctgcgtgaagaagtgtccccgtaattatgtggtgacagatcacggctcgtgcgtccgagcctgtggggccgacagctatgagatggaggaagacggcgtccgcaagtgtaagaagtgcgaagggccttgccgcaaagtgtgtaacggaataggtattggtgaatttaaagactcactctccataaatgctacgaatattaaacacttcaaaaactgcacctccatcagtggcgatctccacatcctgccggtggcatttaggggtgactccttcacacatactcctcctctggatccacaggaactggatattctgaaaaccgtaaaggaaatcacagggtttttgctgattcaggcttggcctgaaaacaggacggacctccatgcctttgagaacctagaaatcatacgcggcaggaccaagcaacatggtcagttttctcttgcagtcgtcagcctgaacataacatccttgggattacgctccctcaaggagataagtgatggagatgtgataatttcaggaaacaaaaatttgtgctatgcaaatacaataaactggaaaaaactgtttgggacctccggtcagaaaaccaaaattataagcaacagaggtgaaaacagctgcaaggccacaggccaggtctgccatgccttgtgctcccccgagggctgctggggcccggagcccagggactgcgtctcttgccggaatgtcagccgaggcagggaatgcgtggacaagtgcaaccttctggagggtgagccaagggagtttgtggagaactctgagtgcatacagtgccacccagagtgcctgcctcaggccatgaacatcacctgcacaggacggggaccagacaactgtatccagtgtgcccactacattgacggcccccactgcgtcaagacctgcccggcaggagtcatgggagaaaacaacaccctggtctggaagtacgcagacgccggccatgtgtgccacctgtgccatccaaactgcacctacggatgcactgggccaggtcttgaaggctgtccaacgaatgggcctaagatcccgtccatcgccactgggatggtgggggccctcctcttgctgctggtggtggccctggggatcggcctcttcatgcgaaggcgccacatcgttcggaagcgcacgctgcggaggctgctgcaggagagggagcttgtggagcctcttacacccagtggagaagctcccaaccaagctctcttgaggatcttgaaggaaactgaattcaaaaagatcaaagtgctgggctccggtgcgttcggcacggtgtataagggactctggatcccagaaggtgagaaagttaaaattcccgtcgctatcaaggaattaagagaagcaacatctccgaaagccaacaaggaaatcctcgatgaagcctacgtgatggccagcgtggacaacccccacgtgtgccgcctgctgggcatctgcctcacctccaccgtgcagctcatcacgcagctcatgcccttcggctgcctcctggactatgtccgggaacacaaagacaatattggctcccagtacctgctcaactggtgtgtgcagatcgcaaagggcatgaactacttggaggaccgtcgcttggtgcaccgcgacctggcagccaggaacgtactggtgaaaacaccgcagcatgtcaagatcacagattttgggctggcanactgctgggtgccggagagaagaatacatgcagaagatcccaaggtgcctatcaagtggatggcattggaatcaattttacacagaatctatacccaccagagtgatgtctggagctacggggtgactgtttgggagttgatgacctttggatccaagccatatgacggaatccctgccagcgagatctcctccatcctggagaaaggagaacgcctccctcagccacccatatgtaccatcgatgtctacatgatcatggtcaagtgctggatgatagacgcagatagtcgcccaaagttccgtgagttgatcatcgaattctccaaaatggcccgagacccccagcgctaccttgtcattcagggggatgaaagaatgcatttgccaagtcctacagactccaacttctaccgtgccctgatggatgaagaagacatggacgacgtggtggatgccgacgagtacctcatcccacagcagggcttcttcagcagcccctccacgtcacggactcccctcctgagctctctgagtgcaaccagcaacaattccaccgtggcttgcattgatagaaatgggctgcaaagctgtcccatcaaggaagacagcttcttgcagcgatacagctcagaccccacaggcgccttgactgaggacagcatagacgacaccttcctcccagtgcctgaatacataaaccagtccgttcccaaaaggcccgctggctctgtgcagaatcctgtctatcacaatcagcctctgaaccccgcgcccagcagagacccacactaccaggacccccacagcactgcagtgggcaaccccgagtatctcaacactgtccagcccacctgtgtcaacagcacattcgacagccctgcccactgggcccagaaaggcagccaccaaattagcctggacaaccctgactaccagcaggacttctttcccaaggaagccaagccaaatggcatctttaagggctccacagctgaaaatgcagaatacctaagggtcgcgccacaaagcagtgaatttattggagcatgaccacggaggatagtatgagccctaaaaatccagactctttcgatacccaggaccaagccacagcaggtcctccatcccaacagccatgcccgcattagctcttagacccacagactggttttgcaacgtttacaccgactagccaggaagtacttccacctcgggcacattttgggaagttgcattcctttgtcttcaaactgtgaagcatttacagaaacgcatccagcaagaatattgtccctttgagcagaaatttatctttcaaagaggtatatttgaaaaaaaaaaaaagtatatgtgaggatttttattgattggggatcttggagtttttcattgtcgctattgatttttacttcaatgggctcttccaacaaggaagaagcttgctggtagcacttgctaccctgagttcatccaggcccaactgtgagcaaggagcacaagccacaagtcttccagaggatgcttgattccagtggttctgcttcaaggcttccactgcaaaacactaaagatccaagaaggccttcatggccccagcaggccggatcggtactgtatcaagtcatggcaggtacagtaggataagccactctgtcccttcctgggcaaagaagaaacggaggggatggaattcttccttagacttacttttgtaaaaatgtccccacggtacttactccccactgatggaccagtggtttccagtcatgagcgttagactgacttgtttgtcttccattccattgttttgaaactcagtatgctgcccctgtcttgctgtcatgaaatcagcaagagaggatgacacatcaaataataactcggattccagcccacattggattcatcagcatttggaccaatagcccacagctgagaatgtggaatacctaaggatagcaccgcttttgttctcgcaaaaacgtatctcctaatttgaggctcagatgaaatgcatcaggtcctttggggcatagatcagaagactacaaaaatgaagctgctctgaaatctcctttagccatcaccccaaccccccaaaattagtttgtgttacttatggaagatagttttctccttttacttcacttcaaaagctttttactcaaagagtatatgttccctccaggtcagctgcccccaaaccccctccttacgctttgtcacacaaaaagtgtctctgccttgagtcatctattcaagcacttacagctctggccacaacagggcattttacaggtgcgaatgacagtagcattatgagtagtgtggaattcaggtagtaaatatgaaactagggtttgaaattgataatgctttcacaacatttgcagatgttttagaaggaaaaaagttccttcctaaaataatttctctacaattggaagattggaagattcagctagttaggagcccaccttttttcctaatctgtgtgtgccctgtaacctgactggttaacagcagtcctttgtaaacagtgttttaaactctcctagtcaatatccaccccatccaatttatcaaggaagaaatggttcagaaaatattttcagcctacagttatgttcagtcacacacacatacaaaatgttccttttgcttttaaagtaatttttgactcccagatcagtcagagcccctacagcattgttaagaaagtatttgatttttgtctcaatgaaaataaaactatattcatttcc

SEQ ID NO: 1732 - DNA, 402 bp, Homo sapiens
  misc_feature 250, 317, 344: n = A,T,C or G
aacacggtgactattagtaacaatgtattcttgaaaatctctaagacagtagattttaagtgttctccctactgctctgtgcctcagtttccccatccctaaaatgggggtaataattgcacctacttcacatggttgttgtgaggcttgaataagaatacacgaaaagcacttaagattagtttggggcaaaataaatgttaaccctttagtagtgacaactgtaaccacagtttacattagagcttantgctaccttggacagaggggtcctgacattctcatattcccagccccctgggccactctcagcttgnggtattcccagcagcagtctccatcanagaagatggctagtgatgcctcccttttctagaaaaaacaaaacctggccaggcacgg

SEQ ID NO: 1733 - DNA, 318 bp, Homo sapiens
  misc_feature 217, 291: n = A,T,C or G
tttttttgtgcagtatgacacttacaagatggccagactagaggaagccagaggtgggcatggtaacactactgaaaagttggtggtgtgccatggacaagggaccgactgcagagtatgtttgctgaggaaaatagaggcgaggatagagcaggcaggggaagggaaataagacatggagataggaggttaaagcagttgggagtccatacacagnctacccaacttcctgagaactcttagagaggaaaaggcatccttaggcatccttcctgtgaagattgcctattncgtgatcacgctgagaagatgggaact

SEQ ID NO: 1734 - DNA, 434 bp, Homo sapiens
  misc_feature 341, 413: n = A,T,C or G
aggaatcagaaatcaaatcagccattttcaccattttgtctgttacacacagacgtgtgtgatctatggatggctgtgtctacagtcacaaggtaaaatactccttcagctgggttacaacagagcagtgccggctctggagccaggcggtctggctctgagtcctgcttcacataaaggctatgtgaacctgggcgcgttatttaagccccgtcctccacttcccctgcccatctcattaaggattaatgtgagaaattacacaggtcactacatgtaaagcatctttaacagtgcctggtaactaacaacacttcacctgtgttacgaactactctaantaatgggccaagtcatgagctgcacaaaggcccccaagacccaaacgggtttaatgttaagcaaaatgccgnctggtctcaggtagacactca

SEQ ID NO: 1735 - DNA, 415 bp, Homo sapiens
  misc_feature 173, 265, 295, 314, 324, 413, 414, 415: n = A,T,C or G
cagaggcaattccttttaataggatgacaatcataagaaggaacagttacaattctgaatatgaaagagctgtttctttagtaataaaccaaatacaaagttccgggttcatctgttctggctggcaaatcttgcataaaaaagccatactttagctaaacaaaagcttttangctggcccagaaagagggaatgaacaatttgaaaaacatcttttattgcctgagaaaatttaaaaagtgtctgaaagtgccaggagacctgnctcaatgtgactcaggcagctttccaaagnccctcagctttcctaagtntgagtcatangggaaggagagagggctccttggcaaagatacaggttttcctctctggttccacccccaccattttcatttaaaaaaaaaaaaaaaaannn

SEQ ID NO: 1736 - DNA, 439 bp, Homo sapiens
  misc_feature 168, 205, 211, 309, 393, 422: n = A,T,C or G
caaagtatccaccttgttgtcttataatcacctatttacctatttgccctcctagaaaatgcaagaagatattttctctccttccaaattgaaggaagaacataaaagatataacagggaggagatggtgagatatagagtatgagcggagattaggccagctgtggnaattctggacagatcttgggtttagctaagttatttnttttangcctgggtttctgggggtgacagggaagataaaagagtagtttatttgcacctcttggagaattgcttaaaaatatagagatcatggctctgtatgtnaggtggaaccaggtcaggagtatttgaaactgctcctgggtcattgtgacatatccttcacatctttttgagaaactttataanacaatgggggtgaatgggggctgggcagntggagtctctgagcaga

SEQ ID NO: 1737 - DNA, 361 bp, Homo sapiens
  misc_feature 160, 162, 230, 277, 300, 322, 347: n = A,T,C or G
acagctgaccatcacccgtcacacagaacatcccgtcacacggaacatctcacctgtcacacagaacatccctttacccctcacacggaacatcctgtcacctgctgacacggaacatccgatcacccgtcacacggaacatcccatcacacagaacatncnatcacttgtcacatctcacccatcacacggaacatcccgtcagccatcacatctcacccgtcacacanaacatcccttcacccatcacatggaacatcccatcacccatcacatnttacccgtcacatggaacatccnttcacccatcacatggaacatnccgtcatctgctcacatggaacatnccatcacccatcac

SEQ ID NO: 1738 - DNA, 3132 bp, Homo sapiens
cggatcgcagctctcgcggcagtcgcctgagacttaaggttattgcttggccgcggcctggtattccggcgattcgtttcttgctcggcttcctggagctgtggtccgtgtgggcttccacctcagacagttgcgctggctcagcggggccggaacatggctgcgtccggtctggatcatctcaaaaatggctacagaagaagattttgtcgaccttccagggcacgtgacattaacacagagcaaggccagaatgttctggaaatcttacaagactgttttgaagaaaaaagtcttgccaatgattttagtacaaattctacaaaatcagtgcctaattcaacacgcaaaataaaagacacttgtattcagtcaccaagcaaagagtgccagaaatcacatccaaagtcagttccagtttcttcaaagaagaaagaagcctctctacagtttgttgtagaaccaagtgaagccacaaacagatcagttcaggcccatgaagttcatcagaaaattctggcaactgatgttagttccaaaaatacacctgactcgaaaaaaatatcaagtagaaacataaatgatcatcacagtgaagctgatgaagaattttacttatccgttggctcaccttctgttcttttggatgcaaaaacatctgtatcacaaaatgttattccatctagtgccaaaaagagagagacttacacttttgaaaattcagtaaatatgctgccttcaagtacagaggtttcagttaaaaccaaaaaaaggttaaactttgatgataaagttatgttaaagaaaatagaaatagataataaagtatcagatgaagaggataaaacatcggaaggacaagaaagaaaaccatcaggatcatctcagaatagaatacgagattcagaatatgaaattcaacgacaagctaaaaaaagtttttcaacattgtttttagaaacagtaaaacgaaaaagtgaatccagtcccattgttaggcatgcggcaactgctccacctcattcgtgtcctcccgatgatacgaagttgatagaggatgaatttataattgatgagtcggatcaaagttttgccagtagatcttggattacaataccaagaaaggcagggtctctgaaacaacgcacaatatccccggctgagagcactgcactctttcaaggtagaaagtcaagagaaaagcatcataatatattacctaagactttggcaaatgacaaacattcccataaacctcacccagtagagacatctcagccctctgataaaacagtactggatacaagttatgctttgatagatgaaacagtaaataattatagatctacaaaatatgaaatgtattccaagaatgcagaaaaaccatctagaagcaaaaggactataaaacaaaaacagagaagaaaattcatggctaaaccagctgaagaacagcttgatgtgggacagtctaaagatgaaaacatacatacatcacatattacccaagacgaatttcaaagaaattcagacagaaatatggaagagcatgaagagatgggaaatgattgtgtttccaaaaaacagatgccacctgtgggaagcaagaaaagtagcactagaaaagataaggaagaatctaaaaagaagcgcttttccagtgagtccaagaacaaacttgtacctgaagaagtgacttcaactgtcacgaaaagtcgaagaatttccaggcgtccatctgattggtgggtggtaaaatcagaggagagtcctgtttatagcaattcttcagtaagaaatgaattaccaatgcatcacaatagtagccgaaaatctactaagaaaacaaatcagtcatctaagaatattaggaaaaaaactattccacttaaaaggcagaagacagcaactaaaggcaaccaaagagtacagaagtttttaaatgctgaaggttctggaggtatcgttggtcatgatgaaatttccagatgttcactgagtgagccattggaaagtgatgaggcagacttggctaagaagaaaaatcttgattgttctagatctacaagaagctcaaagaatgaagataacattatgactgcacagaatgttcccctaaagcctcagaccagtggatatacatgtaatataccaacagagtcaaacttggattctggagagcataagacttcagttttagaggaaagtggaccttccaggctcaataataattatttaatgtctggaaagaatgatgtggatgatgaggaagttcatggaagttcagatgactcaaaacaatctaaagtgataccaaagaacagaatccatcacaaactagtattgccctccaacacaccaaatgttcgcaggaccaagagaacacgtttgaaacctttggagtactggcgaggagagcgaatagattatcaaggaaggccatcaggaggattcgtgattagtggagtactatctccagacacaatatcgtctaaaaggaaggcaaaagaaaatattggaaaagtcaacaaaaaatctaataagaaaaggatctgtcttgataacgatgaaagaaagactaacttaatggtaaatctaggtatacctcttggagatcctttgcagccaacgagggtaaaggacccagaaacaagagagattattctcatggatcttgtaaggccacaagatacatatcaattttttgttaagcatggtgagttgaaggtatacaagacattggatacaccctttttttctactgggaaattgatattaggaccacaagaagaaaagggaaagcagcatgttggccaggatatattggttttttatgttaactttggtgaccttttgtgtactttacatgaaacaccttatatattaagtactggggattcgttctatgttccttcaggtaactattataacatcaaaaatctccggaatgaggaaagtgttcttctttttactcagataaaaagatgaaagatcaaccaaccttaaatatatgtatgtatatatgtatatgtaaaaacagtttgtatagttggaatatttgtctttgtaattacttgtgatgttttaaaataaaaattttattcagttttgtgtaaaaaaaaaaaaaaaaaa

SEQ ID NO: 1739 - DNA, 216 bp, Homo sapiens
acaaaaggtcaccaaagttaacataaaaaaccaatatatcctggccaacatgctgctttcccttttcttcttgtggtcctaatatcaatttcccagtagaaaaaaagggtgtatccaatgtcttgtataccttcaactcaccatgcttaacaaaaaattgatatgtatcttgtggccttacaagatccatgagaataatctctcttgtttctgggt

SEQ ID NO: 1740 - DNA, 3302 bp, Homo sapiens
cggcatcctgtgctgtgggggctacgaggaaagatctaattatcatggacctgcgacagtttcttatgtgcctgtccctgtgcacagcctttgccttgagcaaacccacagaaaagaaggaccgtgtacatcatgagcctcagctcagtgacaaggttcacaatgatgctcagagttttgattatgaccatgatgccttcttgggtgctgaagaagcaaagacctttgatcagctgacaccagaagagagcaaggaaaggcttggaaagattgtaagtaaaatagatggcgacaaggacgggtttgtcactgtggatgagctcaaagactggattaaatttgcacaaaagcgctggatttacgaggatgtagagcgacagtggaaggggcatgacctcaatgaggacggcctcgtttcctgggaggagtataaaaatgccacctacggctacgttttagatgatccagatcctgatgatggatttaactataaacagatgatggttagagatgagcggaggtttaaaatggcagacaaggatggagacctcattgccaccaaggaggagttcacagctttcctgcaccctgaggagtatgactacatgaaagatatagtagtacaggaaacaatggaagatatagataagaatgctgatggtttcattgatctagaagagtatattggtgacatgtacagccatgatgggaatactgatgagccagaatgggtaaagacagagcgagagcagtttgttgagtttcgggataagaaccgtgatgggaagatggacaaggaagagaccaaagactggatccttccctcagactatgatcatgcagaggcagaagccaggcacctggtctatgaatcagaccaaaacaaggatggcaagcttaccaaggaggagatcgttgacaagtatgacttatttgttggcagccaggccacagattttggggaggccttagtacggcatgatgagttctgagctgcggaggaaccctcatttcctcaaaagtaatttatttttacagcttctggtttcacatgaaattgtttgcgctactgagactgttactacaaactttttaagacatgaaaaggcgtaatgaaaaccatcccgtccccattcctcctcctctctgagggactggagggaagccgtgcttctgaggaacaactctaattagtacacttgtgtttgtagatttacactttgtattatgtattaacatggcgtgtttatttttgtatttttctctggttgggagtatgatatgaaggatcaagatcctccactcacacatgtagacaaacattagctctttactctttctcaaccccttatatgattttaataattctcacttcactaattttgtaagcctgagatcaataagaaatgttcaggagagaggaaagaaaaaatatatatgctccacaatttatatttagagagagaacacttagtcttgcctgtcaaaaagtccaacatttcataggtagtaggggccacatattacattcagttgctataggtccagcaactgaacctgccattacctgggcaaggaaagatccctttgctctaggaaagcttggcccaaattgattttcttctttttccccctgtaggactgactgttggctaattttgtcaagcacagctgtggtgggaagagttagggccagtgtcttgaaaatcaatcaagtagtgaatgtgatctctttgcagagctatagatagaaacagctggaaaactaaaggaaaaatacaaatgttttcggggcatacattttttttctgggtgtgcatctgttgaaatgctcaagacttaattatttgccttttgaaatcactgtaaatgcccccatccggttcctcttcttcccaggtgtgccaaggaattaatcttggtttcactacaattaaaattcactcctttccaatcatgtcattgaaagtgcctttaacgaaagaaatggtcactgaatgggaattctcttaagaaaccctgagattaaaaaaagactatttggataacttataggaaagcctagaacctcccagtagagtggggatttttttcttcttccctttctcttttggacaatagttaaattagcagtattagttatgagtttggttgcagtgttcttatcttgtgggctgatttccaaaaaccacatgctgctgaatttaccagggatcctcatacctcacaatgcaaaccacttactaccaggcctttttctgtgtccactggagagcttgagctcacactcaaagatcagaggacctacagagagggctctttggtttgaggaccatggcttacctttcctgcctttgacccatcacaccccatttcctcctctttccctctccccgctgccaaaaaaaaaaaaaaggaaacgtttatcatgaatcaacagggtttcagtccttatcaaagagagatgtggaaagagctaaagaaaccaccctttgttcccaactccactttacccatattttatgcaacacaaacactgtccttttgggtccctttcttacagatggacctcttgagaagaattatcgtattccacgtttttagccctcaggttaccaagataaatatatgtatatataacctttattattgctatatctttgtggataatacattcaggtggtgctgggtgatttattataatctgaacctaggtatatcctttggtcttccacagtcatgttgaggtgggctccctggtatggtaaaaagccaggtataatgtaacttcaccccagcctttgtactaagctcttgatagtggatatactcttttaagtttagccccaatatagggtaatggaaatttcctgccctctgggttccccatttttactattaagaagaccagtgataatttaataatgccaccaactctggcttagttaagtgagagtgtgaactgtgtggcaagagagcctcacacctcactaggtgcagagagcccaggccttatgttaaaatcatgcacttgaaaagcaaaccttaatctgcaaagacagcagcaagcattatacggtcatcttgaatgatccctttgaaattttttttttgtttgtttgtttaaatcaagcctgaggctggtgaacagtagctacacacccatattgtgtgttctgtgaatgctagctctcttgaatttggatattggttattttttatagagtgtaaaccaagttttatattctgcaatgcgaacaggtacctatctgtttctaaataaaactgtttacattcaaaaa

SEQ ID NO: 1741 - DNA, 316 bp, Homo sapiens
  misc_feature 13, 22, 237, 298: n = A,T,C or G
caaaggctggggngaagttacnttatacctggctttttaccataccagggagcccacctcaacatgactgtggaagaccaaaggatatacctaggttcagattataataaatcacccagcaccacctgaatgtattatccacaaagatatagcaataataaaggttatatatacatatatttatcttggtaacctgagggctaaaaacgtggaatacgataattcttctcaagaggnccatctgtaagaaagggacccaaaaggacagcgtttgtgttgcataaaatatgggtaaagnggagttgggaacaaaggg

SEQ ID NO: 1742 - DNA, 400 bp, Homo sapiens
  misc_feature 198, 200, 203, 305, 328, 329, 356, 374: n = A,T,C or G
agacaggcaggctcccagtgtgagaagtgcctttaggacaagtagaactgcacacatagatgcaaatgcctgggcctttcttcaggttctgtcatagaacagactgcctgaggccatgctcaggactgcgggcctcagaaacccagcacttgcccctgctctgtctttctgctcccagcagctgaattctagggaaangnctntccgtcaccccaccccgagacagacctgccaagcttctggctttcagattctctgccacatgactgaggtcccatcagcccttttccccaatatgagaatancttgttccagccctccacgtgcnncagggcatggggatcagctggaaaggntgctacacctgtatgctntcctgctccctaaacctgcctcagaa

SEQ ID NO: 1743 - DNA, 842 bp, Homo sapiens
ttcacttctgatgaggaagcctctctccttagccttcagcctttcctcccaccctgccataagtaatttgatcctcaagaagttaaaccacacctcattggtccctggctaattcaccaatttacaaacagcaggaaatagaaacttaagagaaatacacacttctgagaaactgaaacgacaggggaaaggaggtctcactgagcaccgtcccagcatccggacaccacagcggcccttcgctccacgcagaaaaccacacttctcaaaccttcactcaacacttccttccccaaagccagaagatgcacaaggaggaacatgaggtggctgtgctgggggcaccccccagcaccatccttccaaggtccaccgtgatcaacatccacagcgagacctccgtgcccgaccatgtcgtctggtccctgttcaacaccctcttcttgaactggtgctgtctgggcttcatagcattcgcctactccgtgaagtctagggacaggaagatggttggcgacgtgaccggggcccaggcctatgcctccaccgccaagtgcctgaacatctgggccctgattctgggcatcctcatgaccattggattcatcctgtcactggtattcggctctgtgacagtctaccatattatgttacagataatacaggaaaaacggggttactagtagccgcccatagcctgcaacctttgcactccactgtgcaatgctggccctgcacgctggggctgttgcccctgcccccttggtcctgcccctagatacagcagtttatacccacacacctgtctacagtgtcattcaataaagtgcacgtgcttgtga

SEQ ID NO: 1744 - DNA, 316 bp, Homo sapiens
  misc_feature 34, 66, 71, 92, 99, 157, 171, 183, 218, 273, 290: n = A,T,C or G
cacttgtcaaaccttcactcaacacttgcttccnaaagccagaagatgcacaaggaggaacatgangtggntgtgctgggggcaccccccancaccatncttccaaggtccaccgtgatcaacatccacagcgagacctccgtgcccgaccatgtantctggtccctgttnaacaccctcttnttgaactggtgctgtctgggcttcatagcattcgnctactccgtgaagtctagggacaggaagatggatggtgacgtgaccggggcccangcctatgcctccaccgncaagtgcctgaacatctgggccctga

SEQ ID NO: 1745 - DNA, 1898 bp, Homo sapiens
gctcctagtaggtgctggtgaatctggaggtagctacgggatcagggaccagcagtgaaaagtgtacaaactgtatgtgtgtttggattctgccctgtcaactacctgcatgtggcctcaggtaccatcatccaaaaacattgtggctacatgtagatcatgtgcacgtgtttacgaaaccattccccatagccatagccacaggcctcagtcgattgggccagaaggtgcccccactattggcggagaacttagcttcagaattcaccctaaggttcccttagtccccatccccaccacacccccaggtcttgccagagccacctctccccacatgaccccccaagaaagacagccctgtattctaactcaacctgcagcatgccccgcactgccttataagacagttgaggagcggacatcagaaccacctctgaagccctttgttcttttttttctaggtacaggcaccaacctctttgcacagtgagcagcaggactcgctacttctctccacctactcacaacagccagggaccctgggctacccccaaccacccccagcacagccccagcccctacgtcctccccgaagggtcagcagtctgtctgagtcgtcaggcctccagcagccgccccgataatgccccggcactgaagtcgggacacaatcagctttaaccaatggatgaggggggtggccacaggagatggggagaggagtctgaactaaacccctggcttttgtgcacactgcatacgtttcagaactcctggatggtaaccatctctggagtgcagcgcttgctgcagtggaaatgatcaggaatactgaccgtgtttctcttgcctccgaggttcttgggcacactctatagccatactggacaggaaccaggtgccccgtgtaggcatcgtcggtcggtttgccgtcagagatggcgcatctcgctgcatcccccgagagtacaccggttgctctagccacctgcggcccgcccatctgcgctagctggccttcacgctcttgatcgtctttcctttgtattggagaaggactgggtcagagatctgttggagagagagaataaagagattatttttcattatttttaaatggttgtttttgttttaatttgcacagctacacagaggaaataacttaggcactttctgttttttttaaaaaaataataaggtctcatggcttcatttagagaccacagtaacaacagcagcccaccaatcagagaagctggttgttattaaccaagctacagattcacactttctggcctaaaccctaatgggatgaggcttttcaccccaggccatgctggtggtgattttttagcccctaaataaaacactggactatttcctgtttacttcattgattgcaactacaaaggtggactcaaagcaaagcacaatcatgccagccaacattccagaattctgctgagaactccaagtctgtgaggggagaggttttacaagccagacaggcctgggggactgcagtccccaaggagaccctgccacatgctggccctttgagtgagaatgctgcatctttctacatatcttcatgagaatactgagaattggattttccttttcaaaatgcactttgctttttttgtatgttttgttatgttgagatgtttctaaagaaaagattttatgtaattataagatgaagcgtagtgaattgtacagctgttgtaataatgacctatttctatataaaataaaattgtatggcttatgtgtaaattattttgtatctgagataccagttccttttcccaaatataaaagtataaaagttttcttgtgtttttctgtgagtgaaaattttgtaataaattaaccaattgaaaaaaaaaaaaaaa

SEQ ID NO: 1746 - DNA, 275 bp, Homo sapiens
  misc_feature 49, 151, 178, 180, 275: n = A,T,C or G
tggaatgttggctggcatgattgtgctttgctttgagtccacctttgtngttgcaatcaatgaagtaaacaggaaatagtccagtgttttatttaggggctaaaaaatcaccaccaacatggcctgggggtgaaaagcctcatcccattanggtttacgccagaaagtgtgaatctgnancttggttaataacaaccaacttctctgattggtgggctgctgttgttactgtggcctctgaatgaagccatgagaccttattatttttttacctn

SEQ ID NO: 1747 - DNA, 368 bp, Homo sapiens
  misc_feature 223, 323: n = A,T,C or G
tcccaggcggtcccacagaacagcagtgcctcccgaaattcttcactacagacctgctaccgccttcagcatgctaattgtgcatggtggggtggctcagagacctggcacagctctgctcacctttccaacaacatcatacccagcacttcacaaaatatcatagagaaacccttttactttaaagcacacagcatttcactcttgaaaagcactaaatcanttctgtggggacaaacatttacaccatgcctgccattcatgcctgccttacctttatgggtttctctcacatgtttcagaagttccgtccatgtttttgncacaaaggaacatcctttttgacatacatagcctattaaaaaaat

SEQ ID NO: 1748 - DNA, 767 bp, Homo sapiens
aagccacctcaagtggacaaggcacttaccaacagagattgctgatttgctccttaagcaagagattcactgccgctaagcatggctcagaccaactcgttcttcatgctgatctcctccctgatgttcctgtctctgagccaaggccaggagtcccagacagagctgcctaatccccgaatcagctgcccagaaggcaccaatgcctatcgctcctactgctactactttaatgaagaccctgagacctgggttgatgcagatctctattgccagaacatgaattcaggcaacctggtgtctgtgctcacccaggcggagggtgccttcgtggcctcactgattaaggagagtagcactgatgacagcaatgtctggattggcctccatgacccaaaaaagaaccgccgctggcactggagtagtgggtccctggtctcctacaagtcctgggacactggatccccgagcagtgctaatgctggctactgtgcaagcctgacttcatgctcaggattcaagaaatggaaggatgaatcttgtgagaagaagttctcctttgtttgcaagttcaaaaactagaggaagctgaaaaatggatgtctagaactggtcctgcaattactatgaagtcaaaaattaaactagactatgtctccaactcagttcagaccatctcctccctaatgagtttgcatcgctgatcttcagtaccttcacctgtctcagtctctagagccctgaaaaataaaaacaaacttattttt

SEQ ID NO: 1749 - DNA, 595 bp, Homo sapiens
  misc_feature 317, 530, 534, 552, 571, 582, 591: n = A,T,C or G
gcccttaccgacgtcgactatccaagatgtacgcgggggatataaagctcctacagccacctggcctgagaagccaactcagactcagccaacagagattgttgatttgcctcttaagcaagagattcattgcagctcagcatggctcagaccagctcatacttcatgctgatctcctgcctgatgtttctgtctcagagccaaggccaagaggcccagacagagttgccccaggcccggatcagctgcccagaaggcaccaatgcctatcgctcctactgctactactttaatgaagaccgtgagacctgggttgntgcagatctctattgccagaacatgaattcgggcaacctggtgtctgtgctcacccaggccgagggtgcctttgtggcctcactgattaaggagagtggcactgatgacttcaatgtctggattggcctccatgaccccaaaaagaaccgccgctggcactggagcagtgggtccctggtctcctacaagtcctggggcattggagccccaancagngttaatcctggctactgngtgagcctgacctcaagcncaggattccanaaatggaangatg

SEQ ID NO: 1750 - DNA, 546 bp, Homo sapiens
  misc_feature 204, 221, 237, 254, 259, 287, 370, 406, 411, 415, 507, 521: n = A,T,C or G
gcccttaccgacgtcgactatccaagatgtactgaagatcagcgatgcaaactcattagggaggagatggtctgaactgagttggagacatagtctagtttaatttttgacttcatagtaattgcaggaccagttctagacatccatttttcagcttcctctagtttttgaacttgcaaacaaaggagaacttcttctcacaanattcatccttccatttnttgaatcctgagcatnaagtcaggcgttgcccntatanccagcattagcactgctcggggatccantgtcccaggacttgtaggagaccagggaccgactactccagtgccagcggcggttcttttttgggtcatggaggccaatccanacattgctgccatcagtgctacgctccttaatcagngaggncacnaacgcaccctccgcctgggtgagcacagacaccaggttgcctgaattcatgttctggcaatagagatctagcatcaacccaggtctcagggncttcattaaagtantagcagtaggagcgataggcattgg

SEQ ID NO: 1751 - DNA, 465 bp, Homo sapiens
  misc_feature 22, 369, 406, 415, 433, 450, 460, 464: n = A,T,C or G
gcccttaccgacgtcgactatncaagatgtactggagatcagcgatgcaaactcattagggaggagatggtcttgaactgagttggagacatagtctagtttaatttttgacttcatagtaattgcaggaccagttctagacatccatttttcagcttcctctagtttttgaacttgcaaacaaaggagaacttcttctcacaagattcatccttccatttcttgaatcctgagcatggagtcaggcttgcacagtagccagcattagcactgctcggggatccagtgtcccaggacttgtaggagaccagggacccactactccagtgccagcggcggttcttttttgggtcatggaggccaatccanacattgctgtcatcagtgctacttgtccttaatcagngaggccacnaagcaccctcccctgggngaggacagacaccaggngtgcctgaanttant

SEQ ID NO: 1752 - DNA, 434 bp, Homo sapiens
  misc_feature 22, 344, 376, 400, 407, 415, 426: n = A,T,C or G
gcccttaccgacgtcgactatncaagatgtacgcgggggaagccaactcagactcagccaacagagattgttgatttgcctcttaagcaagagattcattgcagctcagcatggctcagaccagctcatacttcatgctgatctcctgcctgatgtttctgtctcagagccaaggccaagaggcccagacagagttgccccaggcccggatcagctgcccagaaggcaccaatgcctatcgctcctactgctactactttaatgaagaccgtgagacctgggttgatgcagatctctattgccagaacatgaattcgggcaacctggtgtctgtgctcacccangccgagggtgcctttgtggcctcctgattaangaggagtggcacttgatgacttcnatgtctnggattggnctccatgaccncaaaaaga

SEQ ID NO: 1753 - DNA, 517 bp, Homo sapiens
  misc_feature 478: n = A,T,C or G
gcccttaccgacgtcgactatccaagatgtactgaagatcagcgatgcaaactcattagggaggagatggtctgaactgagttggagacatagtctagtttaatttttgacttcatagtaattgcaggaccagttctagacatccatttttcagcttcctctagtttttgaacttgcaaacaaaggagaacttcttctcacaagattcatccttccatttcttgaatcctgagcatgaagtcaggcttgcacagtagccagcattagcactgctcggggatccagtgtcccaggacttgtaggagaccagggacccactactccagtgccagcggcggttcttttttgggtcatggaggccaatccacacattgctgtcatcagtgctactctccttaatcagtgaggccacgaaggcaccctccgcctgggtgagcacagacaccaggttgcctgaattcatgttctggcaataganatctgcatcaacccaggtctcagggtcttcattaaagta

SEQ ID NO: 1754 - DNA, 479 bp, Homo sapiens
  misc_feature 24, 454: n = A,T,C or G
gcccttaccgacgtcgactatccnagatgtacgcgggggaagaagccaactcagactcagccaacagagattgttgatttgcctcttaagcaagagattcattgcagctcagcatggctcagaccagctcatacttcatgctgatctcctgcctgatgtttctgtctcagagccaaggccaagaggcccagacagagttgccccaggcccggatcagctgcccagaaggcaccaatgcctatcgctcctactgctactactttaatgaagaccgtgagacctgggttgatgcagatctctattgccagaacatgaattcgggcaacctggtgtctgtgctcacccaggccgagggtgcctttgtggcctcactgatgaaggagagtggcactgatgacttcaatgtctggattggcctccatgaccccaaaaagaaccgccgctggcactggancagtgggtccctggtctcctacaag

SEQ ID NO: 1755 - DNA, 498 bp, Homo sapiens
  misc_feature 22, 353, 413, 469, 473: n = A,T,C or G
gcccttaccgacgtcgactatncaagatgtacgcgggggaagccaactcagactcagccaacagagattgttgatttgcctcttaagcaagagattcattgcagctcagcatggctcagaccagctcatacttcatgctgatctcctgcctgatgtttctgtctcagagccaaggccaagaggcccagacagagttgtcccaggcccggatcagctgcccagaaggcaccaatgcctatcgctcctactgctactactttaatgaagaccgtgagacctgggttgatgcagatctctattgccagaacatgaattcgggcaacctggtgtctgtgctcacccaggccgagggngcctttgtggcctcactgattaaggagagtggcactgatgacttcaatgtctggattggnctccatgaccccaaaaagaaccgccgctggcactggagcagtgggtccctggtctnctanaagtactggggcattggagccccaa

SEQ ID NO: 1756 - DNA, 593 bp, Homo sapiens
  misc_feature 377, 467, 469, 576: n = A,T,C or G
gcccttaccgacgtcgactatccaagatgtacggggacaaggcacttaccaacagagattgctgatttgctccttaagcaagagattcactgccgctaagcatggctcagaccaactcgttcttcatgctgatctcctccctgatgttcctgtctctgagccaaggccaggagtcccagacagagctgcctaatccccgaatcagctgcccagaaggcaccaatgcctatcgctcctactgctactactttaatgaagaccctgagacctgggttgatgcagatctctattgccagaacatgaattcaggcaacctggtgtctgtgctcacccatgcggagggtgccttcgtggcctcactgattaaggagagtagnactgatgacagcaatgtctggattggcctccatgacccaaaaaagaaccgccgctggcactggagtagtgggtccctggtctcctacaantnctgggacactggatccccgagcagtgctaatgctggctactgtgcaagcctgacttcatgctcaggattcaagaaatggaaggatgaatcttgtgagaagaattctnctttgtttgcaagttcc

SEQ ID NO: 1757 - DNA, 123 bp, Homo sapiens
  misc_feature 23, 34, 45, 54, 75, 100: n = A,T,C or G
catcgtctggaactgatttgganacattgtctantttaatttttnacttcatantaattgcaggaccagttctanacatccatttttcaacttcctctantttttgaacttgcaaacaaagga

SEQ ID NO: 1758 - DNA, 331 bp, Homo sapiens
  misc_feature 285, 305: n = A,T,C or G
gcccttaccgacgtcgactatccaagatgtactgaagatcagcgatgcaaactcattagggaggagatggtctgaactgagttggagacatagtctagtttaatttttgacttcatagtaattgcaggaccagttctagacatccatttttcagcttcctctagtttttgaacttgcaaacaaaggagaacttcttctcacaagattcatccttccatttcttgaatcctgagcatgaagtcaggcttgcacagtagccagcattagcactgctcggggatccantgtcccaggacttgtagganaccagggacccactactccagtgcca

SEQ ID NO: 1759 - DNA, 642 bp, Homo sapiens
  misc_feature 476, 534, 536, 569, 613, 630: n = A,T,C or G
gcccttaccgacgtcgactatccaagatgtacgcgggggatataaagctcctacagctacctggcctgagaagccaactcagactcagccaacagagattgttgatttgcctcttaagcaagagattcattgcagctcagcatggctcagaccagctcatacttcatgctgatctcctgcctgatgtttctgtctcagagccaaggccaagaggcccagacagagttgccccaggcccggatcagctgcccagaaggcaccaatgcctatcgctcctactgctactactttaatggagaccgtgagacctgggttgatgcagatctctattgccagaacatgaattcgggcaacctggtgtctgtgctcacccaggccgagggtgcctttgtggcctcactgattaaggagagtggcactgatgacttcaatgtctggattggcctccatgaccccaaaaagaaccgccgctggcnctggagcagtgggtccctggtctcctacaagtcctggggcattggagccccaagcagngntaatcctggctactgtgtgagcctgacatcaancacagggattccagaaatggaaagatgtgccttgtgaagacaanaactcctttgtctgcangttcaaaaacta

SEQ ID NO: 1760 - DNA, 471 bp, Homo sapiens
  misc_feature 339, 438, 439: n = A,T,C or G
gcccttaccgacgtcgactatccaagatgtactgaagatcagcgatgcaaactcattagggaggagatggtctgaactgagttggagacatagtctagtttaatttttgacttcatagtaattgcaggaccagttctagacatccatttttcagcttcctctagtttttgaacttgcaaacaaaggagaacttcttctcacaagattcatccttccatttcttgaatcctgagcatgaagtcaggcttgcacagtagccagcattagcactgctcggggatccagtgtcccaggacttgtaggagaccagggacccactactccagtgccagcgggggntcttttttgggtcatggaggccaatccaaacattgctgtcatcagtgctactctccttaatcaagggagggcacgaaggcaccctccgcctgggtgagnncagacaccaagttgcctgaattcatgttctgg

SEQ ID NO: 1761 - DNA, 461 bp, Homo sapiens
  misc_feature 25, 190, 415, 422, 444: n = A,T,C or G
gcccttaccgacgtcgactatccangatgtacgcgggggagaagccaactcagactcagccaacagagattgttgatttgcctcttaagcaagagattcattgcagctcagcatggctcagaccagctcatacttcatgctgatctcctgcctgatgtttctgtctcagagccaaggccaagaggcccanacagagttgccccaggcccggatcagctgcccagaaggcaccaatgcctatcgctcctactgctactactttaatgaagaccgtgagacctgggttgatgcagatctctattgccagaacatgaattcgggcaacctggtgtctgtgctcacccacgccgagggtgcctttgtggcctcactgattaaggagagaggcactgatgacttcaatgtctggattggnctccatnaccccaaaaagaaccgccgctngcactggagcagtgggt

SEQ ID NO: 1762 - DNA, 386 bp, Homo sapiens
  misc_feature 336, 372: n = A,T,C or G
gcccttaccgacgtcgactatccaagatgtactgaagatcagcgatgcaaactcattagggaggagatggtctgaactgagttggagacatagtctagtttaatttttgacttcatagtaattgcaggaccagttctagacatccatttttcagcttcctctagtttttgaacttgcaaacaaaggagaacttcttctcacaggattcatccttccatttcttgaatccttttttgggtcatggaggccaatccagacattgctgtcatcagtgctactctccttaatcagtgaggccacgaaggcaccctccgcctgggtgagcacagacaccangttgcctgaattcatgttctggcaatagagatctgnatcaacccaggtct

SEQ ID NO: 1763 - DNA, 333 bp, Homo sapiens
  misc_feature 22, 267: n = A,T,C or G
gcccttaccgacgtcgactatncaagatgtactgaagatcagcgatgcaaactcattagggaggagatggtctgaactgagttggagacatagtctagtttaatttttgacttcatagtaattgcaggaccagttctagacatccatttttcagcttcctctagtttttgaacttgcaaacaaaggagaacttcttctcacaagattcatccttccatttcttgaatcctgagcatgaagtcaggcttgcacagtagccagcattancactgctcggggatccagtgtcccaagacttgtaggagaccagggacccactactccagtgccagg

SEQ ID NO: 1764 - DNA, 492 bp, Homo sapiens
  misc_feature 404, 409, 475, 477: n = A,T,C or G
gcccttaccgacgtcgactatccaagatgtactgaagatcagcgatgcaaactcattagggaggagatggtctgaactgagttggagacatagtctagtttaatttttgacttcatagtaattgcaggaccagttctagacatccatttttcagcttcctctagtttttgaacttgcaaacaaaggagaacttcttctcacaagattcatccttccatttcttgaatcctgagcatgaagtcaggcttgcacagtagccagcattagcactgctcggggatccagtgtcccaggacttgtaggagaccagggacccactactccagtgccagcggcggttcttttttgggtcatggaggccaatccagacattgctgtcatcagtgctactctccttaatcagngaggncacgaaggcaccctccgctgggtgagcacagacaccaggttgcctgaattcatgttctggcaatananatctgcatcaaccca

SEQ ID NO: 1765 - DNA, 406 bp, Homo sapiens
  misc_feature 205, 381, 388: n = A,T,C or G
gcccttaccgacgtcgactatccaagatgtacggggacaaggcacttaccaacagagattgctgatttgctccttaagcaagagattcactgccgctaagcatggctcagaccaactcgttcttcatgctgatctcctccctgatgttcctgtctctgagccaaggccaggagtcccagacagagctgcctaatccccgaatcanctgcccagaaggcaccaatgcctatcgctcctactgctactactttaatgaagaccctgagacctgggttgatgcagatctctattgccagaacatgaattcaggcaacctggtgtctgtgctcacccatgcggagggtgccttcgtggcctcactgattaaggagagtagcactnatgacancaatgtctggattggcct

SEQ ID NO: 1766 - DNA, 494 bp, Homo sapiens
  misc_feature 368, 427, 448: n = A,T,C or G
gcccttaccgacgtcgactatccaagatgtactgaagatcagcgatgcaaactcattagggaggagatggtctgaactgagttggagacatagtctagtttaatttttgacttcatagtaattgcaggaccagttctagacatccatttttcagcttcctctagtttttgaacttgcaaacaaaggagaacttcttctcacaagattcatccttccatttcttgaatcctgagcatgaagtcaggcttgcacagtagccagcattagcactgctcggggatccagtgtcccaggacttgtaggagaccagggacccactactccagtgccagcggcggttcttttttgggtcatggaggccaatccanacattgctgtcatcagtgctactctccttaatcagtgaggccacgaaggcaccctccgnctgggtgagcacagacaccanggtgcctgaattcatgttctggcaatagagatctgcatcacccacg

SEQ ID NO: 1767 - DNA, 569 bp, Homo sapiens
  misc_feature 22, 409, 494, 515, 518, 527, 558, 559: n = A,T,C or G
gcccttaccgacgtcgactatncaagatgtactgaagatcagcgatgcaaactcattagggaggagatggtctgaactgagttggagacatagtctagtttaatttttgacttcatagtaattgcaggaccagttctagacatccatttttcagcttcctctagtttttggacttgcaaacaaaggagaacttcttctcacaagattcatccttccatttcttgaatcctgagcatgaagtcaggcttgcacagtagccagcattagcactgctcggggatccagtgtcccaggacttgtaggagaccagggacccactactccagtgccagcggcggttcttttttgggtcatggaggccaatccagacattgctgtcatcagtgctactctccttaatcagtgaggncacgaaggcaccctccgcctgggtgagcacagacaccaggttgcctgaattcatgttctggcaatagagatctgcatcaacccangtctcagggtcttcattaaantantagcagtangagcgataggcattggtgccttctgggcagnntgattccggg

SEQ ID NO: 1768 - DNA, 411 bp, Homo sapiens
  misc_feature 347: n = A,T,C or G
gcccttaccgacgtcgactatccaagatgtaccgggggatataaagctcccacagccacctggcctgagaagccaactcagactcagccaacagagattgttgatttgcctcttaagcaagagattcattgcagctcagcatggctcagaccagctcatacttcatgctgatctcctgcctgatgtttctgtctcagagccaaggccaagaggcccagacagagttgccccaggcccggatcagctgcccagaaggcaccaatgcctatcgctcctactgctactactttaatgaagaccgtgagacctgggttgatgcagatctctattgccagaacatgaattcnggcaacctggtgtctgtgctcacccacgccgagggtgcctttgtggctcactgattaaggagag

SEQ ID NO: 1769 - DNA, 198 bp, Homo sapiens
  misc_feature 26, 93, 106, 175: n = A,T,C or G
gcccttaccgacgtcgactatccaanatgtacggggacaaggcacttaccaacagagattgctgatttgctccttaagcaagagattcactgncgctaagcatggntcagaccaactcgttcttcatgctgatctcccccctgatgttcctgtctctgagccaaggccaggagtnccagacagagctgcctaatcccc

SEQ ID NO: 1770 - DNA, 406 bp, Homo sapiens
  misc_feature 241, 313, 342, 360, 379, 390: n = A,T,C or G
atgtcctgaagatcagcgatgcaaactcattagggaggagatggtctgaactgagttggagacatagtctagtttaatttttgacttcatagtaattgcaggaccagttctagacatccatttttcagcttcctctagtttttgaacttgcaaacaaaggagaacttcttctcacaagattcatccttccatttcttgaatcctgagcatgaagtcaggcttgcacagtagccagcattancactgctcggggatccagtgtcccaggacttgtaggagaccagggacccactactccagtgccagcggcggntcttttttgggtcatggaggccaatccanacattgctgtcatcagangctactctccttaatcagngaggccacganggcaccctccgcctgg

SEQ ID NO: 1771 - DNA, 561 bp, Homo sapiens
  misc_feature 348, 353, 397, 469, 471, 504, 536: n = A,T,C or G
gcccttaccgacgtcgactatccaagatgtacgcggggacaaggcacttaccaacagagattgctgatttgctccttaagcaagagattcactgccgctaagtatggctcagaccaactcgttcttcatgctgatctcctccctgatgttcctgtctctgagccaaggccaggagtcccagacagagctgcctaatccccgaatcagctgcccagaaggcaccaatgcctatcgctcctactgctactactttaatgaagaccctgagacctgggttgatgcagatctctattgccagaacatgaattcaggcaacctggtgtctgtgctcacccaggcggagggtgncttcntggcctcactgattaaggagagtagcgctgatgacagcaatgtntggattggcctccatgacccaaaaaagaaccgccgctggcactggagtagtgggtccctggtctcctacaantnctgggacactggatccccgagcagtgctaatgntggctactgtgcaagcctgacttcatgctcangattcaagaaatggaaaggatgaat

SEQ ID NO: 1772 - DNA, 391 bp, Homo sapiens
  misc_feature 204, 282, 333, 378: n = A,T,C or G
gcccttaccgacgtcgactatccaagatgtactgaagatcagcgatgcaaactcattagggaggagatggtctgaactgagttggagacatagtctagtttaatttttgacttcatagtaattgcaggaccagttctagacatccatttttcagcttcctctagtttttgaacttgcaaacaagggagaacttcttctcacaanattcatccttccatttcttgaatcctgagcatgaagtcaggcttgcacagtagccagcattagcactgctcggggatncagtgtcccaggacttgtaggagaccagggacccactactccagtgccagnggcggttcttttttgggtcatggaggccaatccacacattgctgncatcagtgctact

SEQ ID NO: 1773 - DNA, 563 bp, Homo sapiens
  misc_feature 396, 405, 468, 469, 499, 535, 552: n = A,T,C or G
gcccttaccgacgtcgactatccaagatgtacgcgggacaaggcacttaccaacagagattgctgacttgctccttaagcaagagattcactgccgctaagcatggctcagaccaactcgttcttcatgctgatctcctccctgatgttcctgtctctgagccaaggccaggagtcccagacagagctgcctaatccccgaatcagctgcccagaaggcaccaatgcctatcgctcctactgctactactttaatgaagaccctgagacctgggttgatgcagatctctattgccagaacatgaattcaggcaacctggtgtctgtgctcacccaggcggagggtgccttcgtggcctcactgattaaggagagtagcactgatgacagcaatgtntggattggnctccatgacccaaaaaagaaccgccgctggcactggagtagtgggtccctggtctcctacaannactgggacactggatccccgagcagtgctnatgctggctactgtgcaagcctgacttcatgctcangattcaagaaatggaangatgaatcttg

SEQ ID NO: 1774 - DNA, 507 bp, Homo sapiens
  misc_feature 379, 448, 453, 494, 496: n = A,T,C or G
gcccttaccgacgtcgactatccaagatgtactgaagatcagcgatgcaaactcattagggaggagatggtctgaactgagttggagacatagtctagtttaatttttgacttcatagtaattgcaggaccagttctagacgtccatttttcagcttcctctagtttttgaacttgcaaacaaaggagaacttcttctcacaagattcatccttccatttcttgaatcctgagcatgaagtcaggcttgcacagtagccagcattagcactgctcggggatccagtgtcccaggacttgtaggagaccagggacccactactccagtgccagcggcggttcttttttgggtcatggaggccaatccaaacattgctgtnatcagtgctactctccttaatcagtgagaccacgaaggcaccctccgcctgggtgagcacagacaccangttgnctgaattcatgttctggcaatagagatctgcatcaacccangnctcagggtctt

SEQ ID NO: 1775 - DNA, 414 bp, Homo sapiens
  misc_feature 2, 367: n = A,T,C or G
tnaggtgacactatagaatactcaagctatgcatcaagcttggtaccgagctcggatccactagtaacggccgccagtgtgctggaattcgcccttaccgacgtcgactatccaagatgttgctgtcatcagtgctactctccttaatcagtgaggccacgaaggcaccctccgcctgggtgagcacagacaccaggttgcctgaattcatgttctggcaatagagatctgcatcaaccaggtctcagggtcttcattaaagtagtagcagtaggagcgataggcattggtgccttctgggcagctgattcggggattaggcagctctgtctgggactcctggccttggctcagagacaggaacatnagggaggagatcagcatgaagaacgagttggtctgagccatgcttag

SEQ ID NO: 1776 - DNA, 556 bp, Homo sapiens
  misc_feature 409, 413, 476, 478, 504, 525, 527: n = A,T,C or G
gcccttaccgacgtcgactatccaagatgtactgaagatcagcgatgcaaactcattagggaggagatggtctgaactgagttggagacatagtctagtttaatttttgacttcatagtaattgcaggaccagttctagacatccatttttcagcttcctctagtttttgaacttgcaaacaaaggagaacttcttctcacaagattcatccttccatttcttgaatcctgagcatgaagtcaggcttgcacagtagccagcattagcactgctcggggatccagtgtcccaggacttgtaggagaccagggacccactactccagtgccagcggcggttcttttttgggtcatggaggccaatccacacattgctgtcatcagtgctactctccttaatcagtgaggncacnaaggcaccctccgcctgggtgagcacagacaccaggttgcctgaattcatgttctggcaatananatctgcatcaacccaggtctcagggncttcattaaagtagtagcagnangagcgataggcattggtgccttctgggca

SEQ ID NO: 1777 - DNA, 594 bp, Homo sapiens
  misc_feature 22, 35, 172, 181, 201, 205, 390, 396, 411, 470, 527, 537,544, 567, 577, 578: n = A,T,C or G
gcccttaccgacgtcgactatngaagatgtacgcngggacaaggcacttaccaacagagattgctgatttgctccttaagcaagagattcactgccgctaagcatggctcagaccaactcgttcttcatgctgatctcctccctgatgttcctgtctctgagccaaggccangagtcccanacagagctgcctaatccccnaatnagctgcccagaaggcaccaatgcctatcgctcctactgctactactttaatgaagaccctgagacctgggttgatgcagatctctattgccagaacatgaattcaggcaacctggtgtctgtgctcacccaggcggagggtgccttcgtggcctcactgattaaggagagtagcactgatgacancaatgnctggattggcctccntgacccaaaaaagaaccgccgctggcactggagtagtgggtccctggtctcctacaagncctgggacactggatccccgagcagttgctaatgctggctactgtgcaagcctgacntcatgctcangattcangaaatggaaaggatgaatcttgngagaagaagnnctccttttgttgcaag

SEQ ID NO: 1778 - DNA, 585 bp, Homo sapiens
  misc_feature 22, 335, 467, 469, 498, 546, 572, 577, 585: n = A,T,C or G
gcccttaccgacgtcgactatncaagatgtacggggacaaggcacttaccaacagagattgctgatttgctccttaagcaagagattcactgccgctaagcatggctcagaccaactcgttcttcatgctgatctcctccctgatgttcctgtctctgagccaaggccaggagtcccagacagagctgcctaatccccgaatcagctgcccagaaggcaccaatgcctatcgctcctactgctactactttaatgaagaccctgagacctgggttgatgcagatctctattgccagaacatgaattcaggcaacctggtgtctgtgctcacccangcggagggtgccttcgtggcctcactgattaaggagagtagcactgatgacagcaatgtctggattggcctccatgacccaaaaaagaaccgccgctggcactggagtagtgggtccctggtctcctacaantnctgggacactggatccccgagcagtgctnatgctggctactgtgcaagcctgacttcatgctcaggattcaagaaanggaaggatgaatcttgtgagaagaanttctnctttgttn

SEQ ID NO: 1779 - DNA, 72 bp, Homo sapiens
  misc_feature 44: n = A,T,C or G
gcccttaccgacgtcgactatccaagatgtacggggattaggcngctctgtctgggactcctaaacatggct

SEQ ID NO: 1780 - DNA, 477 bp, Homo sapiens
  misc_feature 368, 379, 382, 409, 416, 450: n = A,T,C or G
gcccttaccgacgtcgactatccaagatgtactgaagatcagcgatgcaaactcattagggaggagatggtctgaactgagttggagacatagtctagtttaatttttgacttcatagtaattgcaggaccagttctagacatccatttttcagcttcctctagtttttgaacttgcaaacaaaggagaacttcttctcacaagattcatccttccatttcttgaatcctgagcatgaagtcaggcttgcacagtagccagcattagcactgctcggggatccagtgtcccaggacttgtaggagaccagggacccactactccagtgccagcggcggttcttttttgggtcatggaggccaatccanacattgctgtnatnagtgctactctccttaatcagtgaggncacgaangcaccctccgcctgggtgagcacagacaccaagntgcctgaattcatgttctggcaataga

SEQ ID NO: 1781 - DNA, 561 bp, Homo sapiens
  misc_feature 353, 406, 447, 469, 470, 502, 517, 518, 534, 540, 559: n = A,T,C or G
gcccttaccgacgtcgactatccaagatgtacgcggggacaaggcacttaccaacagagattgctgatttgctccttaagcaagagattcactgccgctaagcatggctcagaccaactcgttcttcatgctgatctcctccctgatgttcctgtctctgagccaaggccaggagtcccagacagagctgcctaatccccgaatcagctgcccagaaggcatcaatgcctatcgctcctactgctactactttaatgaagaccctgagacctgggttgatgcagatctctattgccagaacatgaattcaggcaacttggtgtctgtgctcacccaggcggagggtgccttcntggcctcactgattaaggagagtagcactgatgacagcaatgtctggattggnctccatgacccaaaaaagaaccgccgctggcactggagtantgggtccctggtctctacaaannctgggacactggatcccgagcagtgctaatgntggctactgtgcaannctgacttattgctcangattcnagaaatggaaggatgaatntt

SEQ ID NO: 1782 - DNA, 162 bp, Homo sapiens
  misc_feature 8, 15, 136: n = A,T,C or G
gcccttancgacgtngactatccaagatgtacggggacaaggcacttaccaacagagattgctgatttgctccttaagcaagagattcactgccgctaagcatggctcagaccaactcgttcttcatgctgatctnctccctgatgttcctgtctctgagcc

SEQ ID NO: 1783 - DNA, 143 bp, Homo sapiens
  misc_feature 15, 27, 43, 65, 80, 97, 104, 111, 132: n = A,T,C or G
gcccttaccgacgtngactatccaagngtactgaagatcagcnatgcaaactcattagggagganatggtctgaactganctggagacatagcctanattaatntttgacntcataggaattgcaggaccanttctagacatg

SEQ ID NO: 1784 - DNA, 472 bp, Homo sapiens
  misc_feature 15, 234, 245, 346, 348, 375, 384, 414, 424, 435: n = A,T,C or G
gcccttaccgacgtngactatccaagatgtacgcgggggatataaagctcctacagctacctggcctgagaagccaactcagactcagccaacagagattgttgatttgcctcttaagcaagagattcattgcagctcagcatggctcagaccagctcatacttcatgctgatctcctgcctgatgtttctgtctcagagccaaggccaagaggcccagacagagttgccccangcccggatcanctgcccagaaggcaccaatgcctatcgctcctactgctactactttaatgaataccgtgagacctgggttgatgcagatctctattgccagaacatgaatncnggcaacctggtgtctgtgctcacccangccgagggngcctttgtggcctcactgattaaggagagnggcactgatnacttcaatgtntggattggcctccatgaccccaaaaagaaccgccctg

SEQ ID NO: 1785 - DNA, 509 bp, Homo sapiens
  misc_feature 240, 302, 368, 410, 442, 476: n = A,T,C or G
gcccttaccgacgtcgactatccaagatgtactgaagatcagcggtgcaaactcattagggaggagatggtctgaactgagttggagacatagtctagtttaatttttgacttcatagtaattgcaggaccagttctagacatccatttttcagcttcctctagtttttgaacttgcatacaaaggagaacttcttctcacaagattcatccttccatttcttgaatcctgagcatgaantcaggcttgcacagtagccagcattagcactgctcggggatccagtgtcccaggacttgtangagaccagggacccactactccagtgccagcggcggttcttttttgggtcatggaggccaatccanacattgctgtcatcagtgctactctccttaatcaagtgaggncacgaaggcaccctccgcctgggtgagcacanacaccaggttgcctgaattcatgttctggcaatngaagatttgcatcaacccaggcctcagggtctt

SEQ ID NO: 1786 - DNA, 493 bp, Homo sapiens
  misc_feature 454: n = A,T,C or G
gcccttaccgacgtcgactatccaagatgtacggggacaaggcacttaccaacagagattgctgatttgctccttaagcaagagattcactgccgctaagcatggctcagaccaactcgttcttcatgctgatctcctccctgatgttcctgtctctgagccaaggccaggagtcccagacagagctgcctaatccccgaatcagctgcccagaaggcaccaatgcctatcactcctactgctactactttaatgaagaccctgagacctgggttgatgcagatctctattgccagaacatgaattcaggcaacctggtgtctgtgctcacccatgcggagggtgccttcgtggcctcactgattaaggagagtagcactgatgacagcaatgtctggattggctccatgacccaaaaaagaaccgccgctggcactggagtagtgggtcctgntctcctacaaaaactgggacactgggatccccgagcagt

SEQ ID NO: 1787 - DNA, 464 bp, Homo sapiens
  misc_feature 15, 336, 339, 349: n = A,T,C or G
gcccttaccgacgtngactatccaagatgtactgaagatcagcgatgcaaactcattagggaggagatggtctgaactgagttggagacatagtctagtttaatttttgacttcatagtaattgcaggaccagttctagacatccatttttcagcttcctctagtttttgaacttgcaaacaaaggagaacttcttctcacaagattcatccttccatttcttgaatcctgagcatgaagtcaggcttgcacagtagccagcattagcactgctcggggatccagtgtcccaggacttgtaggagaccaaggacccactactccagtgccagcggnggntcttttttgngtcatggaggccaatccagacattgctgtcatcagtgctactctccttaatcagtgaggccacgaagcaccctcccctgggtgagcacagacaccaagttgcctgaattcatgtt

SEQ ID NO: 1788 - DNA, 2333 bp, Homo sapiens
acaactgtctgctgcgcccgaaaaacaagtcggtgcgctggggacccggggccggggccgccttactccggcctagccccgcggccctcggtgcgggctccagggcatgctcggtaccccccgcggctccagcccagacgccccggcctcaggtctcggcccccgcttggggccccggccgtgcggcgcgagggagcggccggatggagcggaggatgaaagccggatacttggaccagcaagtgccctacaccttcagcagcaaatcgcccggaaatgggagcttgcgcgaagcgctgatcggcccgctggggaagctcatggacccgggctccctgccgcccctcgactctgaagatctcttccaggatctaagtcacttccaggagacgtggctcgctgaagctcaggtaccagacagtgatgagcagtttgttcctgatttccattcagaaaacctagctttccacagccccaccaccaggatcaagaaggagccccagagtccccgcacagacccggccctgtcctgcagcaggaagccgccactcccctaccaccatggcgagcagtgcctttactccagtgcctatgacccccccagacaaatcgccatcaagtcccctgcccctggtgcccttggacagtcgcccctacagccctttccccgggcagagcaacggaatttcctgagatcctctggcacctcccagccccaccctggccatgggtacctcggggaacatagctccgtcttccagcagcccctggacatttgccactccttcacatctcagggagggggccgggaacccctcccagccccctaccaacaccagctgtcggagccctgcccaccctatccccagcagagctttaagcaagaataccatgatcccctgtatgaacaggcgggccagccagccgtggaccagggtggggtcaatgggcacaggtacccaggggcgggggtggtgatcaaacaggaacagacggacttcgcctacgactcagatgtcaccgggtgcgcatcaatgtacctccacacagagggcttctctgggccctctccaggtgacggggccatgggctatggctatgagaaacctctgcgaccattcccagatgatgtctgcgttgtccctgagaaatttgaaggagacatcaagcaggaaggggtcggtgcatttcgagaggggccgccctaccagcgccggggtgccctgcagctgtggcaatttctggtggccttgctggatgacccaacaaatgcccatttcattgcctggacgggccggggaatggagttcaagctcattgagcctgaggaggtcgccaggctctggggcatccagaagaaccggccagccatgaattacgacaagctgagccgctcgctccgatactattatgagaaaggcatcatgcagaaggtggctggtgagcgttacgtgtacaagtttgtgtgtgagcccgaggccctcttctctttggccttcccggacaatcagcgtccagctctcaaggctgagtttgaccggcctgtcagtgaggaggacacagtccctttgtcccacttggatgagagccccgcctacctcccagagctggctggccccgcccagccatttggccccaagggtggctactcttactagcccccagcggctgttccccctgccgcaggtgggtgctgccctgtgtacatataaatgaatctggtgttggggaaaccttcatctgaaacccacagatgtctctggggcagatccccactgtcctaccagttgccctagcccagactctgagctgctcaccggagtcattgggaaggaaaagtggagaaatggcaagtctagagtctcagaaactcccctgggggtttcacctgggccctggaggaattcagctcagcttcttcctaggtccaagccccccacaccttttccccaaccacagagaacaagagtttgttctgttctgggggacagagaaggcgcttcccaacttcatactggcaggagggtgaggaggttcactgagctccccagatctcccactgcggggagacagaagcctggactctgccccacgctgtggccctggagggtcccggtttgtcagttcttggtgctctgtgttcccagaggcaggcggaggttgaagaaaggaacctgggatgaggggtgctgggtataagcagagagggatgggttcctgctccaagggaccctttgcctttcttctgccctttcctaggcccaggcctgggtttgtacttccacctccaccacatctgccagaccttaataaaggcccccacttctcccatt

SEQ ID NO: 1789 - protein, 551 aa, Homo sapiens
NCLLRPKNKSVRWGPGAGAALLRPSPAALGAGSRACSVPPAAPAQTPRPQVSAPAWGPGRAARGSGRMERRMKAGYLDQQVPYTFSSKSPGNGSLREALIGPLGKLMDPGSLPPLDSEDLFQDLSHFQETWLAEAQVPDSDEQFVPDFHSENLAFHSPTTRIKKEPQSPRTDPALSCSRKPPLPYHHGEQCLYSSAYDPPRQIAIKSPAPGALGQSPLQPFPRAEQRNFLRSSGTSQPHPGHGYLGEHSSVFQQPLDICHSFTSQGGGREPLPAPYQHQLSEPCPPYPQQSFKQEYHDPLYEQAGQPAVDQGGVNGHRYPGAGVVIKQEQTDFAYDSDVTGCASMYLHTEGFSGPSPGDGAMGYGYEKPLRPFPDDVCVVPEKFEGDIKQEGVGAFREGPPYQRRGALQLWQFLVALLDDPTNAHFIAWTGRGMEFKLIEPEEVARLWGIQKNRPAMNYDKLSRSLRYYYEKGIMQKVAGERYVYKFVCEPEALFSLAFPDNQRPALKAEFDRPVSEEDTVPLSHLDESPAYLPELAGPAQPFGPKGGYSY

SEQ ID NO: 1790 - DNA, 385 bp, Homo sapiens
aaacttttatttcacaccatgcaaggtcaattataacacattaaaaagtgacaacagctataagctgcaattttacatttgtaaatcggaaacgtccattttcaaaagctgaacataactatcaaattgtaatagctaagcttcaatccaactgcttatacagatgaaattttctatgaacaacaatgattttatatctgtccacattctgtgatagttattcttcgacaaacagaccctttgggagaaccaaatgattcaatctttttcacagtatccatgccatccttaacaaacccaaatactacatgcttaaagtccaaatgttctgctttcttcagtgttataacaaattgagaattattggtattctggccttgattgg

SEQ ID NO: 1791 - DNA, 295 bp, Homo sapiens
ctggagtctggtctcatcaccagacttgacacaggacaggcacatcttccctccatggattcccaagaacagagcatgaggctcaatgggtaccacatctatcttttcttctaaattgacatttggtccttgcaagtatccagcaactagttggttgttcctcagatagaaggtcttctggttaacatcccagattctgaaggcttgcatcttgctggattttctcccagagggtcggcagatcgtctctgaatggaacaggaagaggaggagagtgattaggtgactgcggagg

SEQ ID NO: 1792 - DNA, 451 bp, Homo sapiens
  misc_feature 43: n = A,T,C or G
ctgacaggtgattaaacaacttgctgcctcggttcttctcccnaaaggttatcacttctttgatctgctctgagatgggtgccaacaaatcggaaagcttattttctgctggctgttgacactgagaagctgtaaccaacagagctcgctccaacttcaaacctgtgtggaccatctccgcatgtttctgcacgtctcccccaatctctttactgatcttcaagtactctgccacaggaccagcaagcagcgagtcaaatgcctgcacatatggagctgctcctgcttttgaaggactgtctgcatacccacggtgcatgtcggaggtatgagatactgcctccaggcggcccactgccctctccaatctttctaccagattttgcatgtcagccataatggaccacctcagagttccgcctcacctccggactgcgatcagccgctctcc

SEQ ID NO: 1793 - DNA, 488 bp, Homo sapiens
  misc_feature 6, 42, 488: n = A,T,C or G
aaattntctggatgagcaagaaggggttaaaagtggaatgtntgttgtaatagaagttaaagttgcaactcaagaaggaaaggaaataacctgtcgaagttatctgatgacaaattacgaaagtgctcccccatccccacagtataaaaagattatttgcatgggtgcaaaagaaaatggtttgccgctggagtatcaagagaagttaaaagcaatagaaccaaatgactatacaggaaaggtctcagaagaaattgaagacatcatcaaaaagggggaaacacaaactctttagaacataacagaatatatctaagggtattctatgtgctaatataaaatatttttaacacttgagaacagggatctgggggatctccacgtttgatccattttcagcagtgctctgaaggagtatcttacttgggtgattccttgtttttagactataaaaagaaactgggataggagttagacaatttacctcn

SEQ ID NO: 1794 - DNA, 599 bp, Homo sapiens
  misc_feature 535, 539, 542: n = A,T,C or G
ccaacaaaggggattgcctgcagaaaggggagagcgtcgagttccaattgtgtgtcctgggccaaaatgcacaaactatggcttacaacatcacacccctgcgcagggccacagtggaatgtgtgaaagatcagtttggcttcattaactatgaagtaggagatagcaagaagctctttttccatgtgaaagaagttcaggatggcattgagctacaggcaggagatgaggtggagttctcagtgattcttaatcagcgcactggcaagtgcagcgcctgtaatgtttggcgagtctgtgagggccccaaggctgttgcagctcctcgacctgatcggttggtcaatcgcttgaagaatatcactctggatgatgccagtgctcctcgcctaatggttcttcgtcagccaaggggaccagataactcaatggggtttggtgcagaaagaaagatccgtcaagctggtgtcattgactaaccacatccacaaagcacaccattaatccactatgatcaagttggggggaatctggngaanggntctgaatatctccctcttcatccctcccgaaatctggaatacttattctattgagct

SEQ ID NO: 1795 - DNA, 362 bp, Homo sapiens
  misc_feature 264: n = A,T,C or G
ccaagaaccttctatttgaaaaagaacgagaagcagaagaaaaggaaaaatcaaatgagattcccactaaaaatatcgaaggtcagatgacaccatactatcctgtgggaatgggaaatggtacaccttgtagtttgaaacagaaccggcccagatcaagtactgtgatgtacatatgtcatcctgaatctaagcatgaaattctttcagtagctgaagttacaacttgtgaatatgaagttgtcattttgacaccactcttgngcagtcatcctaaatataggttcagagcatctcctgtgaatgacatattttgtcaatcactgccaggatctccatttaagcccctcaccctgaggcag

SEQ ID NO: 1796 - DNA, 230 bp, Homo sapiens
tgtttgaggactctgcggatcagcgctacaggagtacatctgccctgccacatgactccagaagtctctgaccccatttgtttttaatggcatcagccaatgagttatcacccttttcctcctcttttctctttaatcttctgttgatttacacctttgacatttgtattcgtcaaccctgtggcttgttagcatcagaacctctctgaagaccaaacttccctgtgcgg

SEQ ID NO: 1797 - DNA, 260 bp, Homo sapiens
  misc_feature 6, 40, 41: n = A,T,C or G
ccactnctggaaacccactgatagatgagtttcccccatnnttctggcctccgccacatgatcaggaagctggacttgctcttatccaaccactcgaggttccctttcttcctcagttcctctaatacaatctggatcgactccacaggaagctttcgctgtagcttgacgttgttgaagagcgggctctcctgagcttccatcaccgtcatgctggactgtttgtgcaggcggcagaaggacaggaccagcgagcacca

SEQ ID NO: 1798 - DNA, 477 bp, Homo sapiens
aaaaaatggaaatattcaattgagacttgaggggaataatagaaaattaagatagatccccaatattttggaataccaaaattgccttaaaaattcccttctgtttcttacatgggatcaaatacttgagattagtacttcagagtactggccttgttcaatttagtacttcaattagtattaaacttcactaaaaagtaaaccatactccaaattgtatattggattgcattttggggtcctaggtcatacgttcttcaaaattattatgattgtactattgtacttgaaattacagatgttattataattacagtcaaatgtagactatcaggccaaattaaaggggagcatggcagataaccataaagtcatttatatttgattttgaaatgtatttttgtactttattttgaatatcatccatatgtctgacattattggaatttgtaacattgttaatgcactaagtgattt

SEQ ID NO: 1799 - DNA, 226 bp, Homo sapiens
aaatcagaacttacattattaatctacatcagtgaatgttaaatgaagtcattttaacaaattatgactgtacaaatcaaaatactactagttaatattagacaagagtatcttacaaacactactattacatattaccttgcaatctgaaacattatatttcatatttgtgtatatttattttagataactgaaacttcacagaatttaacagcaaataaagttt

SEQ ID NO: 1800 - DNA, 567 bp, Homo sapiens
  misc_feature 40, 534, 567: n = A,T,C or G
aaatatcgcaatcctgcattaatcctgggctttctaaggncggagaataccttcatagcctcagtagctggcatgtggtaggtgcttcgttcttgtttttttgtttgtttgttttgttttctgtttttcattgtctagttttatacagggattgtaagaccgcataggcccagatcatgccaaatgtacctatatggctcccccaattaatcacaattcagcagcatccactccccatatgtggctgagataacttactttgactgtctatttggttatctctcagacaaagcttcaacgaaataaaatggacaggtttgtggactgtgtagagcagcggaaaagtttccacattttcttggactgcttcaccttctgtcagcggctccaaggtgtctgctccaggcatgtctacacaccactctctttctggtaaatcttgtacagaaactccattatcctttctgtgaattcctcatcttctcttcctcctttgattgatgtatttctgtctcctttactgacagtgagctngctgagggtaggggctctttcctatgtatccgn

SEQ ID NO: 1801 - DNA, 485 bp, Homo sapiens
ctggaatgttgttggaggtctggtctccttccttggggaaagtgattttggttccttctttccaccccttcttcacttcgatggtcaatattttgtcttcgtttcgaatgctctttccgtcggggtttagccgcttgtgggagattttcatcttcttggtacagccgctgtagatctcttcaagggagactcgaaggtcgtgggtgactgggggatcttgcttctttcgggcgggctcttgggcagagcgggagcggccaaagttcacgttggtgaagccacccatgcccatagggaagccagagaatgggtcatcaatgtccatgccttcctccccgttccgctgcccaaaaaaggtgtcaaagggatttctgccaccgaagaactcagcaaacatggcatgagggtctccatggaatgtgtagctgaaagaggtaccattggcaccaccgccgctaccgccactggggccactcccctttagg

SEQ ID NO: 1802 - DNA, 212 bp, Homo sapiens
ccatggtgggaaatgggcatgagaataaatacctccccaaattcaatctgagcccagcaggagaggatggtagggttgccagggctcagaagtgcaagctgattactcaccccaccctgcctcgccgcacctttcctttgtttccttgggtgaatgcaggagcagcagtggctgcccttcccacctggacagtggtgtgtgtagaaagccag

SEQ ID NO: 1803 - DNA, 614 bp, Homo sapiens
aaaagagggtgagaacaatgattatgtttgcaaagttctgagaagtccatctactgtccaaactttggattgaagtccttattttgttttttcctttacttagagacaggtatatacagtgctgctgtaataatgaaacaaaggtgaaatctactgtaaagttgcacaatacagaaaactgttgctccatcttctactacataaacgtgtgactccacaggttagtaatgttgttgtcattgtttttgttaagttggaattattccatcacgtctaagacctctctttaactccagatcctccaattttttccacaattcttcacgctccttttctttctttttctcacgctgacgatctgacttgtatgtggctgtcagctcgtcaaacatggtgctgttcatttccataaatgccttcaacacattgtacaccaacgccacaatagccggattccaatgttcttttgaaatcctataaaggctggaaaacatgatgggaaggatgacgttagagttttcttctatcaaactcatgatgtattcattattccaataatagaggctctttctgcccctgaaaatgggggctagatacacacttggcgattggtt

SEQ ID NO: 1804 - DNA, 360 bp, Homo sapiens
aaaagcgcagtggtttgatcttatttatatgaagactttttaacatatcaagaattaggtgcattggcaggtagggtttggggtgtgataactgcttcagatggaatgttcacttaagctttgtcttcttaaaaattatcaatgtgaatgtcataattatatatatttttgtggaaaattttctcctaagtataagttattgtgcaaaatatagtgtcattgatgcaaataatagtttaacttttagtttagaactcctaaaagatataaattgtattgcatatgcattaaaagtttgttttatttaattttatgtagatgtgtgaagtgttaggtaaaatttttttcacttatccattt

SEQ ID NO: 1805 - DNA, 586 bp, Homo sapiens
  misc_feature 40: n = A,T,C or G
ttcagtcgccatcatgattatctaccgggacctcatcagncacgatgagatgttctccgacatctacaagatccgggagatcgcggacgggttgtgcctggaggtggaggggaagatggtcagtaggacagaaggtaacattgatgactcgctcattggtggaaatgcctccgctgaaggccccgagggtgaaggtaccgaaagcacagtaatcactggtgtcgatattgtcatgaaccatcacctgcaggaaacaagtttcacaaaagaagcctacaagaagtacatcaaagattacatgaaatcaatcaaagggaaacttgaagaacagagaccagaaagagtaaaaccttttatgacaggggctgcagaacaaatcaagcacatccttgctaatttcaaaaactaccagttctttattggtgaaaacatgaatccagatggcatggttgctctattggactaccgtgaggatggtgtgaccccatatatgattttctttaaggatgggttagaaatggaaaaatgttaacaaatgtggcaattattttggatctatcacctgtcatcataactggcttctgct

SEQ ID NO: 1806 - DNA, 362 bp, Homo sapiens
ctgtcagtgaggactcatctgttacccagatctaccatgcagttgcagctctaagtggctttggccttcccttggcatcccaagaagcactcagtgcccttactgctcgtctcagcaaggaggagactgtgctggcaacagtccaggctctgcagacagcatcccacctgtcccagcaggctgacctgaggagcatcgtggaggagattgaggaccttgttgctcgcctggatgaactcgggggcgtgtatctccagtttgaagaaggactggaaacaacagcgttatttgtggctgccacctacaagcccatggatcatgtggggactgagccatccattaaggaggatcaggtcatccag

SEQ ID NO: 1807 - DNA, 333 bp, Homo sapiens
  misc_feature 42: n = A,T,C or G
aaaatattgtaactgataatttccataaaaaccatttacatngtttcaacctttctgcataaaactgtattatgagataggcaaacaatctcacaagatggtctgagacataaaaacaaaagacaacctatccagcatcaatgtcctattgacaaactcaatgaagaattaagaatcacactccacaatgtgctgctccaccaagaaatagaaatgtaatgattttttgaaaggtaaatgcttcacaataaacagtcttcttgggtagtacagtgtaattgtgattgtttaggactgctcttgtgggctaatatttacgctgttgtttttttt

SEQ ID NO: 1808 - DNA, 592 bp, Homo sapiens
  misc_feature 40, 581: n = A,T,C or G
ccagaacgtgaaccactggacaggatatagctgttccagnttagggagcccactcgggcagagtgactggtcatatttcgaagccgtttctgctgctgcacatcccatagctgcacctcagcactgctggtgcccacagccaagtagttgccctctttgatccaggccacagaggatatatattccccaggctgctccatttgcaaaagctgcaggatgtcaccagagcttgcactccacaggtacacactgttgtccagtgccacggccagtacattcccagaactccaatccacaaggttcaggtaatagtcatttcggatttcaggcgcatccaggatacggtctggcagggaaggaatgtaacggcaggtcttccggctggagccaggagtggccttttggctgtagagtactttcagtctgttctgataaccctctggcgcattttgtggttttccactgagccgaaggatcttggcttcctctacatcaaaaccgttcaggttcaaagcccaggctttctgatgttccttcttggtgggcgtctggctgttttcaggctggttctccttgctcangaggaagctgg

SEQ ID NO: 1809 - DNA, 191 bp, Homo sapiens
  misc_feature 7, 42: n = A,T,C or G
gtgaatnaaacccaaagactccggacagtctgtgaaagggantaagaattgcagttctgaaggcccctgactttggttgtttacaaagttcaatcctgtttattgtgatccttggtatcttcttcatctgtatattctgatggttcttctcctggttttaggagtctgcctacataatcatatttttcttt

SEQ ID NO: 1810 - DNA, 205 bp, Homo sapiens
gtggctgccctcactgtctgctacatctcagacttcttcaaagcccgacccccacagcactgtctgaaggaggaggagctggaacggaagcccagcctgtcactgacgttgaccctgggcgaggctgaccacaaccactatggatacccgcactcctcctcctgaggccggaccccgcccaggcagggagctgctgtgagtccag

SEQ ID NO: 1811 - DNA, 366 bp, Homo sapiens
  misc_feature 41, 43, 48, 242: n = A,T,C or G
aaacgtttaaagtgtacaagttgctttgttacaataaaacnanatgtntacacaaaggatttgatgcttttctctcagcataggtatgcttactatgaccttccaagtttgacttgtataacatcactgtcaaactttgtcaccctaacttcgtattttttgatacgcactttgcaggatgacctcagggctatgtggattgagtaatgggatttgaatcaatgtattaatatctccatagntgggaaacgtgggttcaatttgccattggtttctgaaagtattcacatcatttgggataccagatagctcaatactctctgagtacattgtgcccttgatttttatctccaagtggcagttttt

SEQ ID NO: 1812 - DNA, 311 bp, Homo sapiens
  misc_feature 7: n = A,T,C or G
ctgccancaaatcatcagccattttgtcgaggtttggagccttccccgtgtaaatgaagcacatcatttccttaaaaacttcaggctccacatcattgatttcaactcgattctttttgctctcctccattacatgttcaaacatggcactaaaaaccggagaacgagctgctaagatagccttgtgagcctggaattcctggccggcaacacacaagcagcagtctgtgaaccgggaattctcccacagtcctcctaactcatctgccagccggcactcaggaacctttaccatgttcatggtattctgg

SEQ ID NO: 1813 - DNA, 567 bp, Homo sapiens
  misc_feature 5: n = A,T,C or G
ccagnaccattatacaagtaatgttattgagtttacaactgaagttctgtaaaattgtttctagatcgacaccccgaggagcaaccctgcattattatatcaaccttttcccctcccctaaaccgtccccaaacctgtgacttttccttgctgagaagctatctcccaggttctggttactaatgtttgttttgacagcctaaaaggcaaaccccttaattactagcaagcaatcaagttcctgggaagcctgatttttattagaactaaactctcttagctgatatactgtcttttgctactccttgtatattttataagttcaattgagaaagctttctgattcagattttcagctcactgaacagttgcagcattgtaagaccacatgttgagggtcccctaataaatattttatgagccaagacgaggtcttttcctgggggacgattcttcttcttcatcttcctcttcatcatctggataatccactaagccaaccaaacttcccttggtggctgttactgacgtaggcaagtttgtggttttggaagaggatccattaga

SEQ ID NO: 1814 - DNA, 174 bp, Homo sapiens
acctacttggatcttggcatgcacccacctaacccactttctcaagaacaagaacctagaatgaatatccaagcacctcgagctatgcaacctctgttcttgtatttcttatgatctctgatgggttcttctcgaaaatgccaagtggaagactttgcggcatgctccagattt

SEQ ID NO: 1815 - DNA, 286 bp, Homo sapiens
tatactaccaccttaaaaatttcctcaagcataaaacatgtttataaagttacaaatttgaatgtaactaaagatacatagacattttattattacactttcatgtactgcttgataaattatgtatcagttaaaaacactaaattatctcaaggtgcattcaatatctgtagggtagttaacaaaaacacacacgaaaaaaatatatattctatattctgtggaaaataacacagctttgataatgaccactgttaaaaactccaattctgattgatatcttttt

SEQ ID NO: 1816 - DNA, 218 bp, Homo sapiens
tttcaaggaactaccctaatggaaacccaggggaaaggttaaaaacagaagaaaaacaaacccaaccctatccctgcaaactgaaatgtgaaagagtctgttataagtttgagacaactgcattatcaccaagatgtaaccgaaccccctcggtttgtccctatgagtggtaatcagtttcatttagggccttcaaacctgaggtagttgagggtcac

SEQ ID NO: 1817 - DNA, 627 bp, Homo sapiens
  misc_feature 42: n = A,T,C or G
ctgaagttaattttaatattttatttaactcaatacatccgnaatgttatcattttaacatgtaattgatgtaaagatttattctgatagtttgtactatttcttgtactaattttttgaaatctggtatgcattttacaaatttgggcaagccacattttaagtgctcattagccacatgaggccagtggatactgtattgaatagcacagtcctatagcatatttattaatttgtcttgtagtaagatgaaatagacaataatacggaataatatcttaaatggaaatctttgttagtctctagagccttcattgcttgataaataggacatctaaactttagatataaatcagttgtcaatgagataaaattattgccagcaaatattttccttcaaagataagtaacttttgatatggcagttggtgaaatgaaagaatataatctgccctcttgttaaatggttgactattctgtagcttgtaggtagtacgtattagaaacttgtgtatgtgggaaatatttggcataatactgttttcagtatatagtagctattttttaaggaaattagtttcatacaagaaaaagattattataaaagtgatacttttgcatgaaata

SEQ ID NO: 1818 - DNA, 405 bp, Homo sapiens
ttcaacgtgtagagatgaaaacgtccgtgaagctgcttctcgagtaaataatttgaacccacactgtgtgtccctgattcctttgacacaaaggaaccacaccagaaagtggaacccatacatgagaagagtacggaagtaagaacgctgagcaattgattctttttctaaatgagctcgagatccacatgctatagccatttgattaggccaaggctgtagatcatttagccccttttctaatttctcaacatctggaaactttgtggctccatcagcatctgccataaggatcttttctcctcgagaactgaatatacccattctaatcgctccaccttttccacgattcttcaccagggttatcacacgtactttgtcacttccatatttctggcaatattt

SEQ ID NO: 1819 - DNA, 449 bp, Homo sapiens
aatgtcttcatagtgtaaaatgcctgttccttcacgattgaattctgaaacatttagataacaaagagaaacagttgagttttcctccctcatctaacaaagtcaaaattaactctatttttaacaattacaaaattagaaacctccttagaatttatcttagaatcagtcagtctgcatataattgaaaatgttcaattaacaaacaattattcataagctttggtatattaactaaaaagagttgggttccagcagttcgttttgtttcatagctacctgagaagtaaatccattggaactggacactaccatcacataaggctgtggctgttgctccgttttctcagtgttctctttcaaatgatcttcagattcctttttctctacttcctgtgtaagagtttttgtttcttgagttttgataactgaagtgattacagtgccag

SEQ ID NO: 1820 - DNA, 579 bp, Homo sapiens
gaaggggtttccactgtcgggtacaggaataagaatgtgagacagaagacatggcggcctaaccacccgcaagccttcgtggggagcgttcgcgagggacaaggctttgcttttcgaagaaaactgaaaatacagcaaagttacaagaaattgctacggaaggaaaagaaggctcaaacgtcactggaatctcaattcacagatcgatacccagataatctgaaacatctctatttagctgaagaggaaagacataggaagcaagcaagaaaagtcgaccatcctttgtcagaacaagttcaccagccgttgcttgaagaacagtgtagcattgacgagcctttatttgaagatcagtgtagctttgaccagcctcagccagaagaacaatgtattaaaacagtaaactcctttacaattccaaagaaaaataaaaagaaaacatcaaatcaaaaagcacaagaagaatatgaacagatacaagccaaacgtgctgctaagaaacaagaattcgagaggagaaaacaggagagagaagaagcccaaaggcagtacaaaaagaagaaaatggaagtgttt

SEQ ID NO: 1821 - DNA, 314 bp, Homo sapiens
aatcaaatgagattcccactaaaaatatcgaaggtcagatgacaccatactatcctgtgggaatgggaaatggtacaccttgtagtttgaaacagaaccggcccagatcaagtactgtgatgtacatatgtcatcctgaatctaagcatgaaattctttcagtagctgaagttacaacttgtgaatatgaagttgtcattttgacaccactcttgtgcagtcatcctaaatataggttcagagcatctcctgtgaatgacatattttgtcaatcactgccaggatctccatttaagcccctcaccctgaggcag

SEQ ID NO: 1822 - DNA, 630 bp, Homo sapiens
  misc_feature 40: n = A,T,C or G
cctcaaccaggattccccagagccgatggtccgatcatgnggcaggaagccaaaccttctggctgctcacaatatcaatcagcttccctttaatcttcaggaagtgtctcttgaactccaatccatcacccttagaaagccggaagtcaaccaatattttatcatccatttctaacaaattcactttgaaaatgagtttattgtttctcctatcagttgttgatatagtaacctgattcatacaacttttcttccattgatagcccaacttctcacaagtctctttcaggcattgataagatttgtctgcatccaatttggtaaagaatcgtgtcattcttttgaccaaccgctgccaggggttctgtgaggatcctggggtgccaagtaactgactattcaaaagcatatgatcaggacatgtgggctgggaaaagctgatcccttgtaccaatttatcaatgtatgaggggctggtatcccataaggaaagacctgtgcggggttctggctgagaactggagtacttcacattttcttcactagaagcactgtttactggagagaagtccaaattggattgaatgtgcttagaaaatccactgggagactctgacacaccacacctgc

SEQ ID NO: 1823 - DNA, 99 bp, Homo sapiens
ataggttgagagaatgtgactatgaagaaagtattctaaccaactaaaaaaaatattgaaaccacttttgattgaagcaaaatgaataatgctagattt

SEQ ID NO: 1824 - DNA, 573 bp, Homo sapiens
  misc_feature 7, 39, 40, 48, 159, 197, 307, 430, 481, 547: n = A,T,C or G
ccactcntggccaaagccatacagtggaacagtgtgttnnttaacctngtaggacaactctcatatgcctgggcactatttttaggttactaccttggctgcccttctttaagaaaaaaaaaagaaaaaaaagaacttttccacaagtttctcttcctntagttggaaaattagagaaatcatgtttttaattttgngttatttcagatcacaaattcaaacacttgtaaacattaagcttctgttcaatcccctgggaagaggattcattctgatatttacggttcaaaagaagttgtaatattgngcttggaacacagagaaccagttattaacttcctactactattatataataaataataacagctcggcccaggttactgtgacctctgacagatcaaggaaacaagttattttctcctcttgngattacagcacattgcaagacatttttttccttttaataaacgtcctagtnctctgagtttccctttcaattcatttaatttcaacaatctgtcaaaaaacagccaataaacaaatnctgaattacattctgctgggtttttt

SEQ ID NO: 1825 - DNA, 75 bp, Homo sapiens
tagggatatttttataaaacaattgtgtcctccccacattttgctatgttaatatttgcttctaacaatttgcag

SEQ ID NO: 1826 - DNA, 593 bp, Homo sapiens
ttattatacaaagcaatctacattagtaggtaaaaagaaattctcaaatttagcaatgtcattttccatccaacatccatctaatttacagatgggtttccactattcatactggaattagaattctgtaataaattttttctaatgttttctgtacatattaaataacccaaaaggttcctcttgtagtgcatgtaccatttagcaagtctattcagtatttttccagtaccattctcattacagtgatttgcctgtaaatgtagttaatatctaaaagtgcacacagttaactttcccaaataacggaccatttctggaggaaacctaatattcacagaaaagattaccaataacaatgattagaaatgtagggttagaatgtactctgagactatacaacacaattatatacacaagctaaaggacattaagtctttagcctatatttacataaaataatgtgtgtttccacagggtcataccaataactcagtatggtactagatataattaggattgttagctacaattcagtatagcaagacagccctaaaatgccctgaactgacttccgctaactaaaactccca

SEQ ID NO: 1827 - DNA, 562 bp, Homo sapiens
  misc_feature 8, 46: n = A,T,C or G
ctggcttnaagaaggaatagagcatggacacgccctgggattcatngtgatctctaatttgtgctctgtcttaaaatagtcgaggaactgtttgagggtcatctcctcaccattaggctgcagcccttgtacctcaaagcgatcccacaatgtccactcttggttatagtactggtgacgtggtgcggcaaggggttcagagaaaccaaagaaaggcagggccaagttgaggaaaccattcttgtaggagtcaagctgtcggtgcccctgcacaaccttgtacagctccagacacacaaggccaaccacggctgctgtggtcgtggcaatggctgggatgatcttccctgcaatcagcttgctcttgtgccggtctgcagaaggaatgtcatagttttctgcccggaggttggatgcagccacgatgaaatccatatgaaagttgctgtcatcatccttctcaaagtcaatggggtacatcttgaatccagggagcttgtctgggctgggcagagtggctttgagctcctctaggcgactgtcatcaacagaggcattggcg

SEQ ID NO: 1828 - DNA, 318 bp, Homo sapiens
cctgttctgggagatggtcatattcacctgccaaaatgtgctggaatcctttgatggtctccttcaggggtaccagcttccccatatgacctgtgaagacctcagcaacctggaatggctgagacaagaaacgctgtattttccgtgcacgggacacggtcaacttgtcttcctcagaaagttcatccatacccaggatggcaatgatatcctggagggatttgtagtcctgcaggatcttttgcaccccacgggcaacatcgtaatgctcactgccaacaatgttgggatccatgatacgagaggtggagtctagag

SEQ ID NO: 1829 - DNA, 533 bp, Homo sapiens
ctctcctttggccgccgcgcgggagagaggccgagatgggttttgagattgccaaggctcaggtcgctcggcctggtggcgacacgatctttgggaagatcatccgcaaggaaataccagccaaaatcatttttgaggatgaccggtgccttgctttccatgacatttcccctcaagcaccaacacattttctggtgatacccaagaaacatatatcccagatttctgtggcagaagatgatgatgaaagtcttcttggacacttaatgattgttggcaagaaatgtgctgctgatctgggcctgaataagggttatcgaatggtggtgaatgaaggttcagatggtggacagtctgtctatcacgttcatctccatgttcttggaggtcggcaaatgcattggcctcctggttaagcacgttttggggataattttctcttctttaggcaatgattaagttaggcaatttccagtatgttaagtaacacacttatttttgcctgtgtatggagagattcaagaaataatttt

SEQ ID NO: 1830 - DNA, 716 bp, Homo sapiens
  misc_feature 40, 43, 53: n = A,T,C or G
ccttggtttccaacgccggcgaggatgaggcccagtcccnctntccctcgcangcacccttgctaagatgtcctcctgggtgaccaaaacggtggtaatatagccaaggttacttttacttgggtaggatgactgcagaaggaatggctacacagagcttccagacctttccatgcgttgtgctctccagaggatgcgccaggtgtatcagatttgcatgcacaaagacaggtgtgcgccccacccaccctgggctgggcagcaagaggtctgctcacctactgcaccagacttcctagcctccttccacactccgaatcttcaagcagggtgaaaagagaccacagaaactgaagcaagactaggatgctgcaaagaaagatgctctgatacacaaaagccaaaacataagacaaggagggaagagtaaaatgagggagacagacaggaagttaaactatgcagttacactgccgatttagaaagatgttaagacacacactagatacaaatgaaacccatcctgctcccttcctccagaagacgttgtaatgcagaaagccaaaatactacatccttcttgtagtcagcactgttagtattcaacactttaatatttatggtgtatcacataaaaaacaaagtcatatacttttgcattaatcaaaaaatagcaaatccatataatggcaaaatcaggaaaaaaattctagtat

SEQ ID NO: 1831 - DNA, 470 bp, Homo sapiens
  misc_feature 39, 234: n = A,T,C or G
aaagaatttattaagcctgttataccacacagtatgttntatacactgacatacgactccctaataagataaagcaaagacaaaaaagtttatcttattagaaacaagatacaccaccacttattgtcttcaaacattattgcactttaactttcttaatttgacaaagcattcaagaaacatctgcagactagttttaacagacaaataacacctgtaagcagacatgactgncctaaattgtttattaagtatgaattttacaaactttacttatattagcggtaacggtggagctggagagtattgcgccttctccaagctgcccggcgagagccaccaatagtgtggtggaacttgtggccctttccaaggccacggctctttcggcctgcagatgtcagcccacgcatctccctgtgcttgtggactggtttggcgatccactgggtgtcaggatttcttctgat

SEQ ID NO: 1832 - DNA, 504 bp, Homo sapiens
  misc_feature 469, 489, 500: n = A,T,C or G
acttggttttcttcttctacccacttgatttcacatttgtgtgtccaactgaaattatcgcttttggcgacagacttgaagaattcagatctataaatactgaagtggtagcatgctctgttgattcacagtttacccatttggcctggattaatacccctcgaagacaaggaggacttgggccaataaggattccacttctttcagatttgacccatcagatctcaaaggactatggtgtatacctagaggactcaggccacactcttagaggtctcttcattattgatgacaaaggaatcctaagacaaattactctgaatgatcttcctgtgggtagatcagtggatgagacactacgtttggttcaagcattccagtacactgacaaacacggagaagtctgccctgctggctggaaacctggtagtgaaacaataatcccagatccagacctgcccgggccggncgctaagggcgaattctgcngatatccatcncact

SEQ ID NO: 1833 - DNA, 336 bp, Homo sapiens
  misc_feature 8, 41, 44, 55: n = A,T,C or G
aaaaacanaacaaaacaaaacaaaatgaaagaatgtggtcngcngctaaggaggntttcacatgttgtttaactccagtaaagtctgatccagcatctgatgcatactaaggttttcttctttggcatgagccactttctcttctaagtcatcaatgcttttctccaatttagttactgacctctccgcaaactcagcccgagtctcagcctccttcagcttgtcggaaaggaccttgatctcttcctcatatctgtcttccttctgcgagtacttatcctctgcagccattaatgctttcaaggtctgatccattattcttaattgttcttccag

SEQ ID NO: 1834 - DNA, 635 bp, Homo sapiens
  misc_feature 620: n = A,T,C or G
aaatatgtctagagtggatgtatatacaacacattctcctgctggaacttctgtgcaaaacatgttgcactggagccaggctgttaaattccaaaagtttcaagcctttgactggggaagcagtgccaagaattattttcattacaaccagagttatcctcccacatacaatgtgaaggacatgcttgtgccgactgcagtctggagcgggggtcacgactggcttgtagatgtctacgacgtcaatatcttactgactcagatcaccaacttggtgttccatgagagcattccggaatgggagcatcttgacttcatttggggcctggatgccccttggaggctttataataaaattattaatctaatgaggaaatatcagtgaaagctggacttgagctgtgtaccaccaagtcaatgattatgtcatgtgaaaatgtgtttgcttcatttctgtaaaacacttgtttttctttcccaggtcttttgtttttttatatccaagaaaatgataactttgaagatgcccagttcactctagtttcaattagaaacatactagctattttttctttaattagggctggaataggaagccagtgtctcaaccatagtattgnctctttaagtctttt

SEQ ID NO: 1835 - DNA, 495 bp, Homo sapiens
  misc_feature 8, 40, 52: n = A,T,C or G
tgaacttntttccaatggaaaactcacggcccagtcccanaggaactgtgcncataccaaacaacgatgaggaaggaagggccgggtggctctaccaaacagttcaggtccactgggtgaatgaagcctggtgggaaagcggactcctgaagttggcgccctctgctggtcccacttctcatcgtggcgggtcgactgcctgagtagaggaagaggctacagatggggctgacaaaaaagggagtgaggggaaccccaggaagatgaagccaaactccaaactatattctgctaatcagttttttgatcaaaaaattcaaaatagaggaaaccacaaagtacaaaagcttttctgatgcttttcattatcacagaacacaccacctgtaatgtgtgcaaaaaggaaatgaggggtggaaggagaggaagtctaattgggaaaggctggatggtcacttcatttcttctctttcttcttatccttttcattcatgg

SEQ ID NO: 1836 - DNA, 262 bp, Homo sapiens
ctgttagagtatttagagtcctgagataacaaggaatccaggcatcctttagacagtcttctgttgtcctttcttcccaatcagagatttgtggatgtgtggaatgacaccaccaccagcaattgtagccttgatgagagaatccaattcttcatctccacgaatagcaagttgcaagtgacgaggggtaatacgctttacctttaagtcttttgatgcatttcctgccagttcaagtacctctgcggtgaggtactccagg

SEQ ID NO: 1837 - DNA, 272 bp, Homo sapiens
  misc_feature 7, 39: n = A,T,C or G
cctctgntgtcaatggattccaggagcaaggccatttgnggcgctttccaaatttcttaggcatttattttgataagtttatagccgtcatgtttctaagagacttggagacaccagcaaactgctagaactcaaactcttcaattactcaaagaaggagccatttcagttaactcaagtgaatgaaagacttttggaatctgcagtgggtccttccctgttgaccatttggtaacttgtaatctgaccaaaaactcttgagctgcaacagg

SEQ ID NO: 1838 - DNA, 379 bp, Homo sapiens
aaattttccagaataatttgagaatagttgatattaagtcttctttaagtatttagcggttttcagcagagaagccatctggtcttagacttttctttgttggaaggctttttgttactaattcagtattgacacttgttatcagtctattccagttttctgttcctttttggttcaatcttggtaggttgcatgcatctaaaaacatatccatttcctctaggtgttttaatgtattggtgtacagttgttcatagtagtttctaatgatcctttgtatttctgtggttttcattgtaacatctttttatttctgattttatttatttgtgtcttctctctttttttcttttcttttctttttttttttttttttttt

SEQ ID NO: 1839 - DNA, 576 bp, Homo sapiens
aaaaaacatttattttaataagactattgcaaacacattaaaaaaactaaatagtaatattacaaaatctatatacttgcacatttagtatttgtcaatgtgccagaggttttcttcatgaaatttgacttctttgaagtgaaggcttttttctatcatctcttatagctctgactgaataagtcttaatgctttcttcatgttttctatcaataggggtaaatcccgaggctcatatgtgtacaatctgttagagtatcttccagctatgtcagctctaactgttaaagaagggtctacaaacatgattctaggcacatattgcccatcaggtgataaattcttatcagtggtttcatgcataaggtttagcatgatgaacttattctgagccatttcttgtatttcttcattttgggcaaatactttctttagtgcttgagagtattgacaatcctccaggtgatgaataaccattaatggcttcttacttttttgagcataaaagagaccttcttcataagtttgtacccaagtgatgtcatctccccatcctcttgagagtgtctgaggagg

SEQ ID NO: 1840 - DNA, 642 bp, Homo sapiens
  misc_feature 40, 41, 578: n = A,T,C or G
ctgttgcatctcagcggggcgcacatgttatccacaagcnntggacctttggggaagggggagtttttagtttgttttacaaatttttcctgcaaaagtggaatcactgtattttcattttaacttatatttgaaattttatttagttcttgaagtagatctgcttcttcatcttgacatgtaatggtcagttgtacgtaatgtatttatatgttaatttgttatgtatatagatgtgcaagtcttgtcagaattggcctcagtgtagttaaagggcagaaggggaagatactgactagtcatagaaatacctcattcgcctgtgggaagagaagggaagcctcttcagggtgagtgaatggcaaagcggttgcttctggctcctccttcccctgtggtcttggaagtgtgtggaaggcagggacagagatggaggccgagccaatagactgaagagaccacagcaattggctcctccatctagagattttcttggcagtattccatgggatgttaagcaaaggaaaccaaaggaatcgtttcaaatggactcatggcttagaaatctttattcttanggcagtcagtagtattctaaagctttctgacaagataaaggaagtcaccaaaatttcttttttt

SEQ ID NO: 1841 - DNA, 466 bp, Homo sapiens
  misc_feature 39, 40: n = A,T,C or G
aaattaaattttttgtttttactatcacaggctggcctnnctaatacaaaataggtgatgaacctctggttttaccataatgcaatgtgccacggaaagtttgggggaggtttttaatgtaattgcactctggttaatcggctcgtaccaagccctgccttatgacttgtggaaagcttcaaggagttccactgatgcaaaagggtcttttcctagcttcctggtctgatcagtgctatgagatggacagataagtgtgaatgttttatacagaaaatggaaatgatacatttctcttgttaggtgttttcataaaatgtagcattttttttcttatggaaataagagtttcaggtgtctccccacctagggcaaattcatgcacattgtcatgttataccaccattctggaaatgattgctgtggatttgaaattgcacttttaattttatatatgacagcattt

SEQ ID NO: 1842 - DNA, 145 bp, Homo sapiens
  misc_feature 5, 39, 42, 45, 51: n = A,T,C or G
gagcngttgtggccgcgttgccgacctccagcagcaggnggnttntctacncagaacccgggagtaggagactcagaatcgaatctcttctccctccccttcttgttttcggctttgtgagaaaccttaccatcaaacacgatgg

SEQ ID NO: 1843 - DNA, 661 bp, Homo sapiens
  misc_feature 617: n = A,T,C or G
ccagcatttaccagacatgcactcagaactgagtaacttaggtacagataacaacaggagccagcacagggaaggttcctctcaagacaggcaggcccaaggagacagcactgaaatgcatggtgaaaacgagaccacccagcctcatactcgaaacagtgacagtaggggtggcaggcagttgcgaaatccaaacaatttagttgaaactggaacactacccattcttcgccttactcacttttttttactaaatgaaagtgatgatgatgatcgaatacgtggtttaaccaaagagcagattgacaatctttccaccaggcactatgagcataacagtattgatagtgaactaggtaaaatctgtagtgtttgtattagtgactatgtaactggaaacaagctcaggcaattaccttgcatgcatgaatttcacattcattgtattgaccgatggctctcagagaattgcacttgtccgatctgtcggcagcctgttttagggtctaacatagcaaacaatgggtaaggtgatgggatctactcaaatactgttttttagtagaactgaatgttcaagcattgttttgctgagttatttgtgattagctaaccangatgaaaaataacagattatatatagtttggaactatttttcgt

SEQ ID NO: 1844 - DNA, 318 bp, Homo sapiens
aaaacaatccttaactagctagcaggacatttactttggattctgcataactgcaaactgacatatttgtaaagctaaaaatcagttttaatacatgattaacagaaactctcatcatgctcattactttaactattgccctttcaatcgctatagaaatatcacttaatccaataagcttgatttcaatagtccaggaagaaaaggtcaaaaaggcacaatgtgaccttagctgacaagaataaccatcctgtctcaagtcttttgtcagtccctggcatgaattacaacattattttcaaaataataaaacatttt

SEQ ID NO: 1845 - DNA, 168 bp, Homo sapiens
gatccctagtaacggccgccagtgtgctggaattcgccctttgccgcccgggcaggtaaatgaattgaaatttttcatgatgctactaatttgccactaaatactgcaaatggtcaccctgaatctcttctgacattggatgttatttgcttatattcttataatttt

SEQ ID NO: 1846 - DNA, 675 bp, Homo sapiens
aaaagaaatatcctgaggcaattaacaaagcaaacacaagcagctttctttccaacgcattaatacatagacactgctcaggttttttttcaccaagttatggctaagtatacaaatagccaatacttgcagttttcaacagtactagaaaacccaaaacctgccctatgaccctcacccttaccattagtaaaacgtaaatttgatcaatcataacctataaagtcatataacaaagggaagactaaagactgatcattatcagtaaatccattcaattccagatgccactttaggctgatgtgtctagtaccctaatgattgagaaatcattaatctagaaaaagcatttgcaaactaaggataacttcgcagttgatgtgcctttttttgctattaaaagtgctatttaacatgctaaaatgtcttatggcacattggactcaacagcatgttctgatgaggcatccatttttagcagtatttttccctagaattttgtttggcatagtaaacccctttgatatattaaaatagttctggtgaaataaatgtaacataaacaaaccttccctgactgacttcactccccacggtagcttttagtgaaaccacagtaactgattaagtcagaaaacgatcaagttttttttttatggcatcttgggggtacta

SEQ ID NO: 1847 - DNA, 195 bp, Homo sapiens
ccattatcaatagctgattctcacttgtcctaatgaagtactcagtgcaggttagcctccttctcccccgccagcttctcttccacttccccacaccgtacatgcctctccctttctctctataactcagctcatctcatagcctttttctttggaaatgcaactctgctgatcacttgtgggctgggatcccag

SEQ ID NO: 1848 - DNA, 626 bp, Homo sapiens
  misc_feature 7: n = A,T,C or G
aaactcncataggtaggtatctttatagttgtagactatggaatgtcagtgttcagccaaacagtatgatggaacagtgaaagtcaattcagtgatggcaacactgaaggaacagttaccctgctttgcctcgaaagtgtcatcaatttgtaattttagtattaactctgtaaaagtgtctgtaggtacgttttatattatataaggacagaccaaaaatcaacctatcaaagcttcaaaaactttgggaaagggtgggattaagtacaagcacatttggcttacagtaaatgaactgatttttattaactgcttttgcccatataaaatgctgatatttactggaaacctagccagcttcacgattatgactaaagtaccagattataatgccagaatataatgtgcaggcaatcgtggatgtctctgacaaagtgtgcctcaaaaataatatacttttacattaaagaaatttaatatttctctggagttggggctcttggctttcagagtttggttaatcagtgttgattctagatgatcaacataatggaccactcctgaatgagacttaattttgtctttcaaatttactgtcttaaatcagtttattaaatctgaatttt

SEQ ID NO: 1849 - DNA, 260 bp, Homo sapiens
  misc_feature 40: n = A,T,C or G
aaatgtgtttttcctgagagacaaggaagacttgggtatnttccaaaacaggtaaaaatcttaaatgtgcaccaagagcaaaggatcaacttttagtcatgatgttctgtaaagacaacaaaccccttttttttctcaattgacttaactgcatgatttctgttttatctacctctaaagcaaatctgcagtgttccaaagactttggtatggattaagcgctgtccagtaacaaaatgaaatctcaaaacagagctcag

SEQ ID NO: 1850 - DNA, 254 bp, Homo sapiens
  misc_feature 8: n = A,T,C or G
gacgaatnggcgtttgccgaggctggcatagatttggctgtctccgctcatagctgcttttggcgcgaaagatgccgggtctggttgactcaaaccctgccccgcctgagtctcaggagaagaagccgctgaagccctgctgcgcttgcccggagaccaagaaggcgcgcgatgcgtgtatcatcgagaaaggagaagaacactgtggacatctaattgaggcccacaaggaatgcatgagagccctaggattt

SEQ ID NO: 1851 - DNA, 653 bp, Homo sapiens
  misc_feature 7, 41: n = A,T,C or G
ccaggtnggaagagatcaggtatgggagcatttggggcatnagaagccacaaatgagcctcccgaggatgttctgctgaaacacacttgcttgtgttgaacatcatccttattaatttcaggtcttggtggattccattgtatttcatcattctcaatccagccaggtatgtacagtgctccactctgctggggtatcactctccgtctggctgcgttaactcctcccagagcccgcacttttacactgtatctaccattcgtgtcataagttgtgaaataccttgagtagacaccgtcatccttagtagcatcagcacctgctccattatccagtagttccaaggtaactgtttttccattcactgattcaatcagggctgtgacactggccctgagaattggggaggctccttggcgaatatttgcataaactaccagagggctggggaatttgctggtgtccttgttcgttttggaagtcactgtaattggaggcagggtagcattggacgcacgggacgtgacagtcagggtcaaggtttgtgagcttgcttgcagactgtatttccaagtgccaaccttagcaatgcctgggatttggaggtaggccattttggtgtttttgtccactacaaagccaccttgcttctg

SEQ ID NO: 1852 - DNA, 537 bp, Homo sapiens
  misc_feature 32, 34, 39, 205, 209, 211, 219, 231, 236, 239, 254, 256,274, 282, 284, 296, 310, 330, 342, 381, 398, 434, 437, 450,464, 487, 500, 517, 523, 531, 536: n = A,T,C or G
gaagtggcgctgcagagctgggctctgctcananatggnagtgccatcttgtacacaccaccatccattataaccgccttccatcactggaattgtatcttatgtaaccaactagcatgcagcattgtaatcttacaactgatcacgtggacagtgaacagcggtcaactttgtcttaaaaaaaaaaaacaaaaaaccccaaaanaccncncaatcctnaaaatttcccancagcnctntcagtcatcagtatntnaggaactgaacttttgancaaaatananattcaaaatccnctttcctactcctntgaggacaatgtttcagggnaaactgggggtntttcccaggggcatgcccacttgacaacatgcccgttcnatcatttcctttccttntccaccacttggcctccggcctgaaaaaggggccancantaaggaatgacanacagtaaggcaatnttacaatgtcaaaaaatgtattnggctttttttttntttttacctgcccgggnggccgntaagggcnaattnt

SEQ ID NO: 1853 - DNA, 63 bp, Homo sapiens
  misc_feature 11, 14, 21, 37, 57: n = A,T,C or G
tatatgcaganaanggtaagngacgagctggacccanccctgttatctcccctaccngccagt

SEQ ID NO: 1854 - DNA, 714 bp, Homo sapiens
  misc_feature 7, 40, 41: n = A,T,C or G
aaaaacnacgtgttttcctttggacttaggtgaattctanntctttacttcactttcaaactacagggcatcgacataaacaaaaacaaatcagattgagagttttgggttgcttttcttcatactgagcgaagaaccttctccctggctgggtgaaagaccatggtgtactgtgatgtccaatctaccacacagggcttcaccaagccaaagcagccacactgaaagaaatctgccaggttctgcatgaatccaagattgtatggtgtcttcctgagggacaacgtctgtttcatatgcttgctctgcttctgcaggctgattctctcatgggaggtcaggcccagaaaggcaatctgaaagagttgatttaataataaaaatgttgaccatgagaaatggaaagttgctagcatcaagatatataaaacccaaggggaacaggccacaatctgattgaggtaagtccataatccatcttctttgaatgttgtggcacaatgactggacaaatagatgaaagatccatatataatccagccacataccatggaaaggaaaaacaagaagaatatgtaatagtgatggttgccaaaacctatgcaccgtccagtccacaggcagtgttgatcatatcgagccacacagcagttgcatacatggcagtggagtgaccttaatggcttccttataagacatgatgtcaaaatgttc

SEQ ID NO: 1855 - DNA, 428 bp, Homo sapiens
  misc_feature 5: n = A,T,C or G
ccatncgcatctttcagggctgccagtttcgctccgtggaggctgtgcaggagatcacagagtatgccaaaagcattcctggttttgtaaatcttgacttgaacgaccaagtaactctcctcaaatatggagtccacgagatcatttacacaatgctggcctccttgatgaataaagatggggttctcatatccgagggccaaggcttcatgacaagggagtttctaaagagcctgcgaaagccttttggtgactttatggagcccaagtttgagtttgctgtgaagttcaatgcactggaattagatgacagcgacttggcaatatttattgctgtcattattctcagtggagaccgcccaggtttgctgaatgtgaagcccattgaagacattcaagacaacctgccacaagccctggagctccag

SEQ ID NO: 1856 - DNA, 201 bp, Homo sapiens
  misc_feature 32, 34: n = A,T,C or G
tggaaaaactccatctccactaaaaatacaanantagcctggtgtggtggcacatgcctgtaatcccagctacttgggaagctgaggcaggagaatcacttgaacctgggaggtggaggttgcagtgagccaagatcacgccattgcactccagcctgggcaacaagagtgaaactccgcctcaaaaaaaaaaaaaaaaaa

SEQ ID NO: 1857 - DNA, 473 bp, Homo sapiens
  misc_feature 34, 39: n = A,T,C or G
taagtgtgaggccagcaacccacggcagggatgnagganggaagccatggctaagctgtgggcctggacaaaggccacagatggggttgaaaggtgagaagcggtaagctagaggagacagacggcgttgccattaaaaacaattcaacttcattttaatgttgctatgtaagttcacaataaaatccctggaagttcaaattggaaagagcagtttggggtcatgggctcaacaatataaaggcagattcagtgaggggtaagggtagtggctctgggggcagactgacctagatttgaatgccagttgtaccagactcaagacaccttgggtaagtggttttatgaagtacctcagttcttcatcagtagaaagagtgctaacacctccataagacttttgtatggattgagtaagataatgcatgttaaaccacttgtatagtttctggctaactgtaaacaagatgttc

SEQ ID NO: 1858 - DNA, 595 bp, Homo sapiens
  misc_feature 2, 36: n = A,T,C or G
tntataaagaattgggaaacatttcaggagacggtnatagcctgtataaataccagattagaacatacggatttaccatgaagttctgtcttcaacatccattctaaagggctactgtcccaaatcctgtgtgtccttttgacttgtctgatcacccaatggaagtggatacttgtaaagtctacaccactgtacttggcgttaaatcttgctgaattcgtggtaagctgttaccatgtctacattttgtagaatgattttggtctgcagcaaaattcgatttcacttctcatacccctttccttccacttgaaatgcaatttagacagaggccctgtggtgaaagttgcaatattaagtttacctttagaagatcccttctcaaactcagaaccctagcagtgttaccttaaacaaaaatgagctcgagaaaaaagtagctcagttacagagaagcaaatcgagttatttcccacataaaaagtttcccagattctaagaattgcagtatcctgtaccctaaaatttttcaaggtgactcctgttgtcgtctgttgataactttaataaaggtcatttaaggacataagttttt

SEQ ID NO: 1859 - DNA, 399 bp, Homo sapiens
  misc_feature 7, 40, 43: n = A,T,C or G
gtgcatntttctaccacactagagatctaggacatttgtnttnatttggtgagttctcttgggaatcatctgcctcttcaggcgcattttgcaataaagtctgtctagggtgggattgtcagaggtctaggggcactgtgggcctagtgaagcctactgtgaggaggcttcactagaagccttaaattaggaattaaggaacttaaaactcagtatggcgtctagggattctttgtacaggaaatattgcccaatgactagtcctcatccatgtagcaccactaattcttccatgcctggaagaaacctggggacttagttaggtagattaatatctggagctcctcgagggaccaaatctccaacttttttttcccctcactagcacctggaatgatg

SEQ ID NO: 1860 - DNA, 496 bp, Homo sapiens
  misc_feature 7, 445, 447, 457, 461, 472, 477, 484, 494: n = A,T,C or G
aaatatnaagggacacttgcaaaaccgcaagacaacttcagtacaaaaacccaaattgataaatctgcaaaatcttaaacttcttaatccattgataaatattaaggagtagctggtcttcaaacaccgtaaaaagttaaagggttgaaaacatgttcaccctttgctatacggtggcatctgaaattatcaggcatgacaacttgaatttgttttgctcttccatgcaagaagtatatatatgcattttaagatagcttagaattaagagttaacttctagtcagtattggtaagtgactaggatggctatccaatcagtattctatggtatcacataccaaagtctctacaatatgacagtcttgtcttgttcagaactcatcacttttgggtagggaagagaggcacggcagaaaagcagttgcaattaaaaaaaaaaaaancngcaaaaaagntttncctgcccgggnggccnttcaaangggcaaattntg

SEQ ID NO: 1861 - DNA, 339 bp, Homo sapiens
ctttccgcgccgccacaatggtgcgcatgaatgtcctggcagatgctctcaagagtatcaacaatgccgaaaagagaggcaaacgccaggtgcttattaggccgtgctccaaagtcatcgtccggtttctcactgtgatgatgaagcatggttacattggcgaatttgaaatcattgatgaccacagagctgggaaaattgttgtgaacctcacaggcaggctaaacaagtgtggggtgatcagccccagatttgacgtgcaactcaaagacctggaaaaatggcagaataatctgcttccatcccgccagtttggtttcattgtactgacaacctcag

SEQ ID NO: 1862 - DNA, 366 bp, Homo sapiens
  misc_feature 5, 6: n = A,T,C or G
aaaanntaagcactgagtcttgttattacaaggcaggcaaatgtttctccctcattttgaaaagactgaactggcaatgcttttcctgaacatttagaaaagaggcagtaagagtactctggtttgggttcaagtgagaggcttttcatgaaaatcttaggattgaagagctctaagttcaggatatctcaatgttcagaaagcctgactaaaagaagccaaaccaaaaccatttaatgtgaacacaaacctcttttcttttagtaagttttacttttaatacagagtgaaagaaaataaaaatttaataggctaaaacaagtcaaacacccattctacacagataaaaaccttcacaaaggtcaa

SEQ ID NO: 1863 - DNA, 383 bp, Homo sapiens
  misc_feature 1, 36, 37, 375: n = A,T,C or G
ntaaaagtttgttaactgttttaatcaatatgagtnntaacaaacatccctaattggattctagagaggaagcagggaaggccaggtgcggtggctcatgcctgtaatcccagcactttgggaggccaaggcgggtggatcacgaggtcaggagttcaagaccagcctagccaacatagtgaaacccccgtctctactaaaaatacaaaaaattagccaggcatggtggcaggtgcctgtaatcccaactacttggggggctgaggcagagaattgcttgaacccgggaggcagaggatgcagtgagctgagatcgcaccactgcactccagcctgggcaacagagcgagactccatctcaaaaaaaaaaaaaanggggaaaa

SEQ ID NO: 1864 - DNA, 296 bp, Homo sapiens
ccttttgaggccgcgtagtcggtgtttttgaactgactctacagcttctgccaggccgtgcggcgccctgacccggcctcaccatgttggtgctgtttgaaacgtctgtgggttacgccatctttaaggttctaaatgagaagaaacttcaagaggttgatagtttatggaaagaatttgaaactccagagaaagcaaacaaaatagtaaagctaaaacattttgagaaatttcaggatacagcagaagcattagcagcattcacagctctgatggagggcaaaatcaataagcag

SEQ ID NO: 1865 - DNA, 646 bp, Homo sapiens
  misc_feature 7: n = A,T,C or G
aaaaggnacaaagaaactccgacatttcacattatgcatagttatgtagccatttcacagtttctttaagatgtgtaaactcattgtccttgatagtttttatttttcattataaaattataccaggagatttcttttaagattctgagttagcagagttcaaaactattttgtggaaacaagccaactagtaacaatgcagcaacacttctggtttagctaaattatttttccaatgtaggaaatccacactgatttgtacgtctgactgagagaaagatggtcgtctccagcagagaaagtgaacagcatttgttggaaggtgatggctctccctcctccctccccatttcattggcgtaacgtaaagtgtattctgtacataatttacaaataaaacattttattttaattgttacttattatttagatatttctcaacacttaaattcataaaattaagaccatgtaagggtatgtttttagagaaatggaagtttgagtaacccacagaacatctgtgatctttctacagcagcttcagttttgtgccaacattccatgtattttgaatatgagcaaaaactgatcttaagagcagacttaaagtagctttggcgccttaatgttcattttgatttatttt

SEQ ID NO: 1866 - DNA, 628 bp, Homo sapiens
  misc_feature 6, 280, 416, 488, 608: n = A,T,C or G
aaacanaattcatagcattacaaaagtttacagaacccctatgttttcatcatttgtttctaacaacaaagattacaatgacagaactgaatgatcagaatgtaaaaatatttgtgcaaaactgcattaattgttcttaccatctaataggggtaaaacttaagaacacgcaatgacaataatgaagaaaaactacattaaaagtaattctacttttgatatcaaacaacatggattatactattactaaacattgaaaaaaaaaacgtggcaccatganagcagcaggagcaacaaatgatttggcaattccagctaaagaaagctgacactggaatatgccaaagttaatctccacagtaggcatccatctgaaaagactggaaacaactgtagggcttcaaacttacttcagngtctttattcttgaatttgtaggtcataaatgaaatatttaagaaagtcttttcccctccctctcaaggagngtttcttgcattactggcaatcattaaaagagttgaatcatagattctctggatttaccaacaccaatccacttaactggaatttgaagctcatcttcaataaatcgaacatagttttgngcattaacaggtagttcttt

SEQ ID NO: 1867 - DNA, 630 bp, Homo sapiens
aaaatatatacaaactttttttcttctattcttctcaaaggcatttgaaagggatacttttatgaatattcttgctgtagaacaatgtagaaataacttctgggtataaaacagtaaaaataaaaatattctacctgagtgtgttaaatcaagtgatttgtaaaacaaaaccttcacaagtgtgggctttctacatgtaacttgccaggctgaaggcttacaccctcatgttctacaacacagatcactaatgatgataacatgagttaaattgggattcttgcccttctgtgtggcttttggcttctaggttctatgaccaaactattgacatatttgaagtctgtatgcagtcattgtgtgataaatctactttacagctttgcttctacctgcagcttacatgataaccatgctgtgaagtgctacatatgcttcatacaatatgttgccccatctgataataaaaatacaaaggtgctctttaagctaaaccataaaccttattagagaattctagttaagtgttttgtttttccacatacatgtaaataccttaagatcaataggatcaataaggataatattagttatcaaaatttagtcttcatacttgaagaatttgttttt

SEQ ID NO: 1868 - DNA, 280 bp, Homo sapiens
  misc_feature 6: n = A,T,C or G
caaaanttgagacctacaaaaatgctgatgttctggttgctgagtctactcctccaggtaatgatgaaccctacactgagcagatgggcaactgtggagagaagggtgaaaggatccacctcactcctgatttcattgcaggaaaaaagttagctgaatatggaccacaaggtagggcatttgtccatgagtgggctctggtaccacagatgcccgccaacacgtccagccaatctttgcatcctcagcagagacggagcttcacagagaccagtgttgg

SEQ ID NO: 1869 - DNA, 651 bp, Homo sapiens
  misc_feature 6: n = A,T,C or G
ccacanttgtgacaattgtgttgctccatatgctgctttctgtgggctgcttggcatactttttgatgcaccagagatggaccatctcccaacaactacagctactccaaaccaaacagttgctgcagccaagtccagctaatgaggaaattctcttttgttttttggagcatggttctttgggaagtggcatccactgcaggaaagcagaatgagcagagccagcagaactgatggagtggcacaaattcccagtgtctggatggtgccacactggcgcctaatcacccgtttaacaagcagaaattaaatgttgctcagcacatgtgtctttcagctcttccttttcacccatggatgatcattgcgagcatgcgctgattggactgaaatgccggggaataggttaggcatgctcagtgccgtccctttgccaccacagtcaaatgacatgcttcactgtggtaccttaatacctgaaatagaaccatggaaaattctgatgtcctctctctgaattatgtacagactacctgggggatcctcttctctccaaatgttagccatcctgaagtagccgaacagtagaaactttggtggggattaaccgggagcttgaaaatttgtctttggtaacctgatactggacag

SEQ ID NO: 1870 - DNA, 414 bp, Homo sapiens
aaatgaaatattcagaattttgattaaaataaataataaattacacaagtttacaagtaacagttaaatatttagggacatgtactaagttttacaaacagtacaaatatttaagagtgttgattgggagtaagggaatgtcaactgccaataaagtggaagatgaaagaataggactttacacagagcatatttagttatgggtctctgtctcctccccacatagaaaaactcccagacattcatgacttcatccaccctgcctggcagataggccatatttcctgaccccctggctcttcacctcaaaaggtttatctttccaccacactagcaaagaccctcaggacacacaactcatactgccagctaagcatctaccccgagggacaaggcaagcacacactagggcag

SEQ ID NO: 1871 - DNA, 690 bp, Homo sapiens
  misc_feature 5: n = A,T,C or G
ctgtnttggtagtaagtgttttgggtataaggtataaaacagaaattagatcagaaaagtgcagggggaagaccactgccaaagagtaatctccaagaacttggtattttccaccgtgaggcagatactgtggggtcatcgctaagtggtttgagtatctgaagccactcattaagatactcaacaagacctaatgcatctgggatgttgtccccttctgaaacaaatttcagcagaactgccatttggatttctttagaacagctttcatcatagagtgtttttgtgatacctcctcccggaatgcggatacaaaactcggaatcatctatttcaggaatgcaccggcttttttccatttcttcccagttaaggctctttattttattttgaacacttttttgcatggaaggtgtaagtaggtaccggaagggagtactacgaagctgcagatcattacgctgatatgaatgactgcttgaaagaacaatgactctggcacagccactgcttttcacccaggaaagcagtttttcacagaatggctttgatttatacttaataaaaatggatcttaactgtagagccaccagctttcttgaaggcaatgaatacacttcagcatttatgctaagttctgttgaatttccttctgtggtcgcatatggattgtttccaaccattggcaca

SEQ ID NO: 1872 - DNA, 262 bp, Homo sapiens
cattctttgccctctgtgcatcagcagcagcgctccccagggctctttctgcttgctgggtcttgtcactggcatctgaaaccttctggctgatgtaggagagtctcttcatggcttcttcagcttctgcttttctgttgtccacctgcaggtcaaactctctgaggtttttaaggatgctctcaacttcataaaaagtggcattgcccatactcagtgcttcttgtgctctgcttttagcaagattggcacgggaaagcag

SEQ ID NO: 1873 - DNA, 69 bp, Homo sapiens
  misc_feature 20, 25, 30, 41, 47, 51: n = A,T,C or G
ttggctttcctgaatccttnttccntgccnggggcctgtcncctgtnttcnctgcctccttttccctgt

SEQ ID NO: 1874 - DNA, 393 bp, Homo sapiens
  misc_feature 5, 390: n = A,T,C or G
aaatntagtcttctggagaagtatttttgacattgagctctgggacaggacaccttgggtttgtggactgcagcccactatgatgttattacttctctggccaggcctccagtggaagtgcacaggcactcccaatgttgttaatgctctgtcttccatttgttctggaatcctacgcgttggtctgtggttccatgcattagctgtttgtaaataatgcatttgcatactgaaaaaggaatgccacctgccacagttgatggtgaggaagctcctttgacgtggtgcaattttgatgagatgtctctggggacacgaggatgccctaatgatgctgacttgtcatggttgcagcatttgaacttttggtgttaaaaaaaaaaaacctgnaag

SEQ ID NO: 1875 - DNA, 492 bp, Homo sapiens
  misc_feature 6, 7: n = A,T,C or G
gtgccnnatcatctttactaagaactgatgcagtcttcctagcctgctgcctcttcttcttcctctccttttgtttttcaaaatttctttctcttcgttttctccttgcctcttttttcttcttattaagcaaagatcttttggtggcttcatcccaattgctgacaaacgaggaaaagatgggaagtgcagccgatttctcagttttcacaaacaggagtttcacgctctcccacttctctggcaatttttctgaaagtcctttggtgacagcaacaatgttttcaatgatgtgctcaatttgcattccaacgtgaccaatacgtatagcactgcaagaaccacttttagaaatgtttaagactgttccacctatacagtcattgatctctcttgataaattcttggacagaaggtttacagatactggaactttctttctttgatagaaatgtctcccaatgagtgagggtaagagccgcctaattctgg

SEQ ID NO: 1876 - DNA, 512 bp, Homo sapiens
acaaagacacctatgttcttcatataaaaacattagtatagatacccatactttctagaaaatgattatacagaccctttcaaagaaaaatgtattccattatataggtttcagtgaggttgcttggaaaaaactcacatctggactgattcctaaaacatagcattccaccactctgcaacttttggttcaaagtatagattattgtcatcagtatgtggtgcctgtattcttacatatttgataatacatatatagactggcttatcacttaatgttccattggttcatcagccttttctgcaggttcatcagcaggttgagcaggctgtgcctttctctgtggtctttcttcaagaccttccaggaatggagacacatcatcatcatcatagattgtaaactccaagtctttaccaacaattccaatggaaacattctttgtagtcaggtcctgttctgcaggaagcgtctctcttaaggcacgcagaccatgtttaactagttcattt

SEQ ID NO: 1877 - DNA, 418 bp, Homo sapiens
cctttgccatgagctgtcttggcccggaagctagatacatcatcatagctctcccgagtgttccactttgagcctttcttctttccaccaaaaccaaacttctggtttttataccgtcgtttagcactgggccccttcctcatctgctggcctttggctcctgccttcttgtgctgtgccagaggtttctgatctccctcaaggaaatccagtttatcagagaagcctttctgatatttcttaatagcattcatcatatgggctttctcctgctgcctcttctgaagaacctccgtttgcaccttcttcccgtatttcctaagtgctcgcagttgcttagctttttcagacctctccatggcagcctgtttagtctgcagcttctgtcgaatcttctgcatctgcagatcagatttgg

SEQ ID NO: 1878 - DNA, 498 bp, Homo sapiens
aaaagatcattgtaattttaacacattcttactaaagaaatacatactatcagtgaccgatctgaaactctgtaacaggtgaagggagacttacgatgaatatctgagcataggttcgctagcatcttcacactcatacataaacattcttaaagggaataagaatgatttcaaattcaaaacaacaacaacaacaaaaaaacaaatttggtcaaactttcttcatcataccattcattgctatcacaatcctagtttgctggtaggtttaagaaaggaatagaaagtttttgaaatccttttaatttctaccagtcttagggcctcttgagtaggccactttggaagcaaactgattaaacagcaccatcaagtccgtatctcaacaaaccattgcataatttctgtcaatgttctcaaaggttaaaacaagttgtatagaagaatacctttcctcaatagcaggccactgtaaaaacatgtaatctgcaagaattt

SEQ ID NO: 1879 - DNA, 574 bp, Homo sapiens
aaagagttctgagtcacaacatgttttagagcatccaagtaccatataatccaactatcatggtaaggccagaaatcttctaacctaccagagcctagatgagacaccgaattaacattaaaatttcagtaactgactgtccctcatgtccatggcctaccatcccttctgaccctggcttccagggacctatgtcttttaatactcactgtcacattgggcaaagttgcttctaatccttatttcccatgtgcacaagtctttttgtattccaacttcctgataacactgcttactgtggaatattcatttgacatctgtctcttttcatttcttttaactaccatgcccttgatatatcttttgcacctgctgaacttcatttctgtatcacctgacctctggatgccaaaacgtttattctgctttgtctgttgtagaattttagataaagctattaatggcaatatttttttgctaaacgtttttgttttttactgtcactagggcaataaaatttatactcaaccatataataacattttttaactactaaaggagtagtttttatttt

SEQ ID NO: 1880 - DNA, 461 bp, Homo sapiens
  misc_feature 44: n = A,T,C or G
aaagtttcacttccctagcaaaatatcttcagtcaagaaattantctttgaaaattatgaaaattgttgtgggaaatatttatacaaattattactgataatgcacatatattttgaaacattgtttctagaagcaataaaatataacctatttaggagataacccaaatgatttgtaaaaaaattaacttgtagaaaagggaaggatgttgtgtaaaatcaagtcaattatttgaggtttttataatattgagtacttatgtactaagtcacacccagccagtcaataactgagaaatcaaaataaaataataatttcaaagaattacataaatacagggccttttgagatttttggcaattgtaaacaaaaacgaatggtttttacaattcagtgtaattctacgaatatttatttggcacccatgttaggcactgaggctacacagcagtgaaatagg

SEQ ID NO: 1881 - DNA, 711 bp, Homo sapiens
  misc_feature 623, 707: n = A,T,C or G
aaaaggccactaaagttaactggacaataaactaggcagacattgctttacaaaaaagagggaaagcccaaaatgccacttatagagaacccacagttcagttttattcagagcaaagaaaaaagaaactttccatcatactagaagaaacttggccgtaaggtttgggatctgtgctcaaactacacatgcaatgaggacaatattctgctaatacaattgacttgctgctgcatttgtctactgtttgtctaatattaacaattataaacagagcagtgcaactagtatttggaacaatccttacagtgttacagtgtcaggcacaacatttcacttctcttcacaccactggttctctttgcgtacctgggcttcctcctcttcagtaaagtcatttttgatattgaaggtcttgcgaatctcctcaggagttttccccttgatcatattggcaacagtcttgcatgtaacatcaagcaaacctttgatgtctaagtagtttgcagccagaatgagttcaaaaagtgttccttggtcaactttcaggaattcttggtcccaaacagggatatcatctgttcgcttttctttgttctcatcatcttcaggagggggagggncatccttgtggtgggtgcaccactgaatgaccttttttaatattgctgcattcacatttggtagaagaactgggtcatcatctncttc

SEQ ID NO: 1882 - DNA, 507 bp, Homo sapiens
  misc_feature 9: n = A,T,C or G
aaattggancttttagcttgtttcatggaactatacaacttgtgggtaactcacatgaccaaacaaaccaaagtgcctgtgacggggcgggtggcgtctacccaccctcccttctagcagattcttattttgtttgaatttataaacaaggctggtggctgtctacccaccctcccttctagcagattttgattttgtttcaatttataacttacactttgaaccatgggtttacttataatggagtctgtagcttcacagcatatttcatgtaatcataaagaccagtatattctctcctgctgaatgacatgcgactgtaaagcctctttataaaccatttccaatgttagtatataggattatttgggaagcatatcaatacctttatagacacatatgaacatgtatgcacacaaaacatttaactatggtatttatggaagacaggtaacaacattaaatctagttgctttcccttagtattagatttgttgagggtttttt

SEQ ID NO: 1883 - DNA, 533 bp, Homo sapiens
  misc_feature 8, 42, 43, 320, 511: n = A,T,C or G
ctgcctcnctgacacttctttactacatttgtaccagtaatnnctgctgaacatcttactgcttgtattcttccattggataagtagaatttctcatcattattgtactcgtcaaatactccccatcgtagatgagcccactcatggacaaatgccctaccttgtggtccatattcagctaacttttttcctgcaatgaaatcaggagtgaggtggatcctttcacccttctctccacagttgcccatctgctcagtgtagggttcatcattacctggaggagtagactcagcaaccagaacatcagcatttttgtaggnctcaagttttggtctcacatagtcagcctttgtcttccatgtttcaggaatcaaaatggcaacatttttgaaataaaatcgctttcctgtagcttcaaacagatacagagatgcctgggtcaccatgtcctttatttgttgaatgagtgtttcatcttctggcacattggggtcgattgcaacgacaatgncttcatagccattgttgttcag

SEQ ID NO: 1884 - DNA, 252 bp, Homo sapiens
  misc_feature 40: n = A,T,C or G
aaaaatgtagtttcatttatattagttatgtttgataaangtctcagtatttttataatatgataagcctgggattctacttttagggttatttgtacttttgagtaatatataaagtgacaatattaaggtacatgatcagctctttctatttttactcgtaaaaattatggaaatgaataattttgctaacaactttgaaatttcaaacttctggaaaatatgaaaatattcattgttcattatgaattt

SEQ ID NO: 1885 - DNA, 583 bp, Homo sapiens
aaaagcataccagtgaaattaatagcagtgcttatcaaagaacactgaaatctgtgagaatctttctaggagcattcttttcttcttttagttccaagttccagggtatttttcattcctagtaggtttatatgactcacagaatgtggacttttttcctgtttggagtatttttgtaatgtaagtatcggatagctgcaccacagcatgcataaattgcacattttgttttactttctttatagaatatttaatttcaaaaatataatttatgccaaaaaaagcatacctttcaattttgctacttggttgatttagcacaaaatgcaaagtcttggggcagagagggggagtgaaaaaaattttataggtaattgttacaaaaatacctgtcagaaaccctaaagctgcattgtaaaacaaatggtgtaaactagttttgaaaagtggtaaggaattgtgaaaaaaatctcagacttaatgctctctaaccacatgagtttcttcttttttatttagtaatacgctgctacatatttggaggtctggtgtttgtaggtcactgaacagacattgaaatctg

SEQ ID NO: 1886 - DNA, 544 bp, Homo sapiens
  misc_feature 6: n = A,T,C or G
aaaatnctgctagattttataatggatttgtgaataaaaaatacccagggttctcagaatggaataaatatcccttttaatagttatatatacagatatacaactgttagctttaattggcagctctcttcttttttcttcttttcactggctttttacttggtgctttttcttgttttgcactggtggtctgtgttcttattttctttggattcttgtctggttccaaaatgatcattttttcttcttcactatctgagagtattatgggagcatcttggcttccaatatcagagacttctactccagtgtccatttttataccatcaagaatgatagcttgatcaccaccgccttcatcatcttccttctcagagtcttcaagatcaccccaggagttttctactccctctccaatttgggcagttccaggagtccatagcacaggtgtagaaacaacttctgaaggaggttctgcttcagcaatgatttcttctgctttttcttctacatccgaggtatcaataggggccttttccatttt

SEQ ID NO: 1887 - DNA, 221 bp, Homo sapiens
ccatgattgaaaaaacaaaaagcaagcatctacaattttttttgataaagactttttatgccaggaatggattaattaccaacaaaatttatactaatcaggctgatgtcaatctatttttgtaatgtatcattaacaaatttattttggaaaagataaaaatattgccccttgataataaatctttttttcctttgatgcaaacagctagaacacctttt

SEQ ID NO: 1888 - DNA, 347 bp, Homo sapiens
  misc_feature 261, 295, 347: n = A,T,C or G
cctatactgaagacagcaagctgttagtacagaccagatgctttcttggcaggctcgttgtacctcttggaaaacctcaatgcaagatagtgtttcagtgctggcatattttggaattctgcacattcatggagtgcaataatactgtatagctttccccacctcccacaaaatcacccagttaatgtgtgtgtgtgttttttttttaaggtaaacattactacttgtaactttttttcttagtcatatttgaaaaagtanaaaattgagttacaatttgattttttttccaaanatgtctgttaaatctgttgggcttttatatgaatatttgttttttatagttn

SEQ ID NO: 1889 - DNA, 538 bp, Homo sapiens
aaataattacaaagagtgtttgctttcaaatgccatgggttacacttttatgggcatgactataaccatttttgtaaagagtaagagttgtataaaataagaaataaatacagtactcaacttcctttcatattagcatcatcaaccctctaattcaccttatgggggaaatgcttctttttgtttgtgatagctattttatcatttccttcatatttttctcttataaaaatgtatttgatactgtgatatgttcacgaaaagtattctttaattattctttgttatagtagagctgttcattatggatatttctgctgccagtcacaatctaaattaattttggcaaaagattgggtacttagttgcctgttactgagttagctctactcttttggaccaaagcaacatgagagcaagtacttttcacacttgttaagatggagttataactgtcatacatttggaatattatgatcccaagtagtctttttataatttggattgtatcgtatgttagatttttgataaaatttgg

SEQ ID NO: 1890 - DNA, 141 bp, Homo sapiens
  misc_feature 41, 42, 49: n = A,T,C or G
cctgtctacaatgtgtgtcctctgtacctcaagcacagccnnggtcagntatgtggttttcatggtggcaaaggctcaccaggagtctcagcttgaaggatggtgacaatctcaacacccttcccctccaaacataagagg

SEQ ID NO: 1891 - DNA, 543 bp, Homo sapiens
  misc_feature 6, 40, 500: n = A,T,C or G
cctggntattcatttccagcgatgtctgaccagagaggantcatcattgacgacctcagggtcacgggggcgacgctgacaccggaacggcagcagcagcaggacgattaagacaaggaggatggctccacagacgctcatgagcgcataggacacaatccacaaaatgggctcgctcaaagactgagcggggacacagttgctggctacatcctctgttgagaaaggcccggaaatttcagacactgcagcacctgcaatttctgcacaggggctcgctgcgaagcccaccctcttctgggctctgtcgaagatgacgtagaagccctccatcaccgtggcaccgatcaccagcgcatttgtggatggggaaatgccgaatcggtaacattcataattcaggccggcccccatcatgggctgaatgtaaagctgaggcaggattgtgatacggaatgacctgctggagttctcgtctctcaggtagatggagattttanggaagtaagaccaaggtgtttccgaattcgtccagcacgccag

SEQ ID NO: 1892 - DNA, 499 bp, Homo sapiens
aaaatcaagatgagtaaaaggagaatggtctcaatatcctcaaaaatgcagtaagagaagtaattccccactgaaaatgtctctctttctttctatgttataccctggagtcctggttgaggggtgggggaatcagaaaagtaggtttacatttaacatttttcttaactacattcacttcttaaaaaggaacaagaagtgtaaataagtatgtatagagtgagggattaagcatatttgcattggggactcgtgtattatgcttttaagtcaaaattaatattctcaaattcgaatttgatagctattatttctaaatctttttaatcctcaattttcctggtaaccttctttcaagagtctccttcttctaaaagttgccaaaccctttatatttaagctttttccactcaggactcaattagagtggtcaacagggagagggatggtcccatttgatctttgccactgagcaaaacaaaacttcaaatgaactttt

SEQ ID NO: 1893 - DNA, 249 bp, Homo sapiens
  misc_feature 42, 129: n = A,T,C or G
aaagccaactcttctatataatcagtttgatgatctgaatgngaaaatacccctggataatcatgttcttgatacacatttcctttttttttgagatggagtctcgctgttgcccaggctggagtacangggcgcgatcttagctcactgcaacctccgcctcccgggttcaagcgattctcctacctcagcctcccaagtcactgggattacaggcgtacaccaccatgccaggctaatttttttatg

SEQ ID NO: 1894 - DNA, 372 bp, Homo sapiens
gtgaaagagatgaaccacgactagaggctgacttagaaatttatgctgactcgatctaaaaaaaattatgttggttaatgttaatctatctaaaatagagcattttgggaatgcttttcaaagaaggtcaagtaacagtcatacagctagaaaagtccctgaaaaaaagaattgttaagaagtataataaccttttcaaaacccacaatgcagcttagttttcctttatttatttgtggtcatgaagactatccccatttctccataaaatcctccctccatactgctgcattatggcacaaaagactctaagtgccaccagacagaaggaccagagtttctgattataaacaatgatgctgggtaatgttt

SEQ ID NO: 1895 - DNA, 335 bp, Homo sapiens
ctgtacaatgccatcttcaaagcctttgtagattacatcccctccatcttcctgcacagttggccgtattctagtatctaacaattccttaatcattgccacaacttcatcatcttcttcagatcctgcttctcctgaaggtgtttcctcagtaaccaggggtaagccagatgcaaagaagtccatgattgttgcataaatatctggtttcagtaaattccagtctaattcttcattttcctttgtgacagtgatgaaatctggtccaaagaagacactttttactccttcaatcctaaataactgcctagccagaggggagcgaaatgctgcag

SEQ ID NO: 1896 - DNA, 66 bp, Homo sapiens
aaattaattatataaaactcgttacttgtagttttgcccttgcaaagatccaaaaaaaaaaaaaag

SEQ ID NO: 1897 - DNA, 238 bp, Homo sapiens
  misc_feature 210, 238: n = A,T,C or G
attttttaagactatggaaataatttaaagatttaagctctggtggatgattatctgctaagtaagtctgaaaatgtaatattttgataatactgtaatatacctgtcacacaaatgcttttctaatgttttaaccttgagtattgcagttgctgctttgtacagaggttactgcaataaaggaagtggattcattaaaaaaaaaaagcncctatagggagtcgtattacaattcacn

SEQ ID NO: 1898 - DNA, 237 bp, Homo sapiens
  misc_feature 44, 67, 69, 73, 77, 90, 101, 127, 129, 170, 194, 237: n = A,T,C or G
gtgaattgtaatacgactcactataggcgctttttttttttaangaatccacttcctttattgcagnancctntgtncaaagcagcaacngcaatactcanggttaaaacattaaaaaagcatttgngngacaggtatattacagtattatcaaaatattacattttcanacttacttagcaaataatcatccnccaaagcttaaatctttaaattatttccatagtcttaaaaaan

SEQ ID NO: 1899 - DNA, 219 bp, Homo sapiens
gcattctgacattacatattttttaagactatggaaataatttaaagatttaagctctggtggatgattatctgctaagtaagtctgaaaatgtaatattttgataatactgtaatatacctgtcacacaaatgcttttctaatgttttaaccttgagtattgcagttgctgctttgtacagaggttactgcaataaaggaagtggattcattaaacct

SEQ ID NO: 1900 - DNA, 473 bp, Homo sapiens
acaaagcagcaactgcaatactcaaggttaaaacattagaaaagcatttgtgtgacaggtatattacagtattatcaaaatattacattttcagacttacttagcagataatcatccaccagagcttaaatctttaaattatttccatagtcttaaaaaatatgtaatgtcagaatgcatataaaaagaatgtaaaaggaaacctaaaatacaaatggaataatgtaacaaataaatatttgatttcagtaactgttaataatcagctcaacaccaccattctctctaaactcaatttaattcttataggaataatgaactgtcaaatgccatggcataattatttatttccaagctatcatcaatgattagaactaaaaaaaatttggcataaaaaaatcacaattcagcataaataaagctatttttagcttcaacactagctagcatctctaagaattgttgaaataagt

SEQ ID NO: 1901 - DNA, 477 bp, Homo sapiens
acttatttcaacaattcttagagatgctagctagtgttgaagctaaaaatagctttatttatgctgaattgtgatttttttatgccaaatttttttttagttctaatcattgatgatagcttggaaataaataattatgccatggcatttgacagttcattattcctataagaattaaattgagtttagagagaatggtggtgttgagctgattattaacagttactgaaatcaaatatttatttgttacattattccatttgtattttaggtttccttttacattcttttttttatatgcattctgacattacatattttttaagactatggaaataatttaaagatttaagctctggtggatgattatctgctaagtaagtctgaaaatgtaatattttgataatactgtaatatacctgtcacacaaatgcttttctaatgttttaaccttgagtattgcagttgctgctttgt

SEQ ID NO: 1902 - DNA, 474 bp, Homo sapiens
acttatttcaacaattcttagagatgctagctagtgttgaagctaaaaatagctttatttatgctgaattgtgattttttttatgccaaaatttttttagttctaatcattgatgatagcttggaaataaataattatgccatggcatttgacagttcattattcctataagaattaaattgagtttagagagaatggtggtgttgagctgattattaacagttactgaaatcaaatatttatttgttacattattccatttgtattttaggtttccttttacattctttttatatgcattctgacattacatattttttaagactatggaaataatttaaagatttaagctctggtggatgattatctgctaagtaagtctgaaaatgtaatattttgataatactgtaatatacctgtcacacaaatgcttttctaatgttttaaccttgagtattgcagttgctgctttgt

SEQ ID NO: 1903 - DNA, 474 bp, Homo sapiens
acaaagcagcaactgcaatactcaaggttaaaacattagaaaagcatttgtgtgacaggtatattacagtattatcaaaatattacattttcagacttacttagcagataatcatccaccagagcttaaatctttaaattatttccatagtcttaaaaaatatgtaatgtcagaatgcatataaaaagaatgtaaaaggaaacctaaaatacaaatggaataatgtaacaaataaatatttgatttcagtaactgttaataatcagctcaacaccaccattctctctaaactcaatttaattcttataggaataatgaactgtcaaatgccatggcataattatttatttccaagctatcatcaatgattagaactaaaaaaattttggcataaaaaaaatcacaattcagcataaataaagctatttttagcttcaacactagctagcatctctaagaattgttgaaataagt

SEQ ID NO: 1904 - DNA, 461 bp, Homo sapiens
acttatttcaacaattcttagagatgctagctagtgttgaagctaaaaatagctttatttatgctgaattgtgatttttttatgccaaattttttttagttctaatcattgatgatagcttggaaataaataattatgccatggcatttgacagttcattattcctataagaattaaattgagtttagagagaatggtggtgttgagctgattattaacagttactgaaatcaaatatttatttgttacattattccatttgtattttaggtttccttttacattctttttatatgcattctgacattacatattttttaagactatggaaataatttaaagatttaagctctggtggatgattatctgctaagtaagtctgaaaatgtaatattttgataatactgtaatatacctgtcacacaaatgcttttctaatgttttaaccttgagtattgcag

SEQ ID NO: 1905 - DNA, 343 bp, Homo sapiens
aatctttaaattatttccatagtcttaaaaaatatgtaatgtcagaatgcatataaaaagaatgtaaaaggaaacctaaaatacaaatggaataatgtaacaaataaatatttgatttcagtaactgttaataatcagctcaacaccaccattctctctaaactcaatttaattcttataggaataatgaagtcaaatgccatggcataattatttatttccaagctatcatcaatgattagaactaaaaaaaatttggcataaaaaaatcacaattcagcataaataaagctatttttagcttcaacactagctagcatctctaagaattgttgaaataagt

SEQ ID NO: 1906 - DNA, 343 bp, Homo sapiens
acttatttcaacaattcttagagatgctagctagtgttgaagctaaaaatagctttatttatgctgaattgtgatttttttatgccaaattttttttagttctaatcattgatgatagcttggaaataaataattatgccatggcatttgacttcattattcctataagaattaaattgagtttagagagaatggtggtgttgagctgattattaacagttactgaaatcaaatatttatttgttacattattccatttgtattttaggtttccttttacattctttttatatgcattctgacattacatattttttaagactatggaaataatttaaagatt

SEQ ID NO: 1907 - DNA, 319 bp, Homo sapiens
aaaaaatatgtaatgtcagaatgcatataaaaagaatgtaaaaggaaacctaaaatacaaatggaataatgtaacaaataaatatttgatttcagtaactgttaataatcagctcaacaccaccattctctctaaactcaatttaattcttataggaataatgaactgtcaaatgccatggcataattatttatttccaagctatcatcaatgattagaactaaaaaaaatttggcataaaaaaatcacaattcagcataaataaagctatttttagcttcaacactagctagcatctctaagaattgttgaaataagt

SEQ ID NO: 1908 - DNA, 319 bp, Homo sapiens
acttatttcaacaattcttagagatgctagctagtgttgaagctaaaaatagctttatttatgctgaattgtgatttttttatgccaaattttttttagttctaatcattgatgatagcttggaaataaataattatgccatggcatttgacagttcattattcctataagaattaaattgagtttagagagaatggtggtgttgagctgattattaacagttactgaaatcaaatatttatttgttacattattccatttgtattttaggtttccttttacattctttttatatgcattctgacattacatatttttt

SEQ ID NO: 1909 - DNA, 239 bp, Homo sapiens
acaggtttcactattacaaatatatgatgttaaactaacaaactcatgaccctcaaagatgtcttcgtcccacgcacacacatttgtaatttgtgtccatttgctatttcccttcttctataatcttcaaattatatagttatgcattgagttccctatgcatctcacccatctcctttatctcagccttctcatactttgccattctcttctttctggaaataaaacattttaaactg

SEQ ID NO: 1910 - DNA, 470 bp, Homo sapiens
aataaatcccagaaggatctgtagatgaggcacctgctttttcttttctctcattgtccaccttactaaaagtcagtagaatcttctacctcataacttccttccaaaggcagctcagaagattagaaccagacttactaaccaattccaccccccaccaacccccttctactgcctactttaaaaaaattttaatagttttctatggaactgatctaagattagaaaaaaaattaattttctttaatttcattatggacttttatttacatgactctaagactataagaaaatctgatggcagtgacaaagtgctagcatttattgttatctaataaagaccttggagcatatgtgcaacttatgagtgtatcagttgttgcatgtaatttttgcctttgtttaagcctggaacttgtaagaaaatgaaaatttaattttttttttctaggacgagctatagaaaagct

SEQ ID NO: 1911 - DNA, 229 bp, Homo sapiens
  misc_feature 20, 22, 28, 38, 41, 44, 64, 68, 73, 85, 89, 102, 112, 128,134, 150, 158, 164, 174, 182, 186, 192, 208, 212, 221: n = A,T,C or G
atttttttttttctaggacnanctatanaaaagctatnganagnatctagttaatcagggcagnagtnggaanccttgctggggnatgngatgggcttctgngcttttgaangactttatcatctagnctttgnctatttttcctttgangttcaagncctagnctataggatnggcagttnaaangctttnctcccccttttaaaanaaangattaaaangggctttg

SEQ ID NO: 1912 - DNA, 226 bp, Homo sapiens
  misc_feature 10, 17, 25, 30, 35, 38, 61, 65, 86, 89, 99, 109, 125, 131,147, 161, 171, 183, 209, 218, 220: n = A,T,C or G
tttttttttntaggacnagctatanaaaanctatnganagtatctagttaatcagggcagnagtnggaaaccttgctggggtatgngangggcttctgngcttttgaangactttatcatctagnctttgnctatttttcctttgangttcaagccctagnctataggatnggcagtttaaangctttactcccccttttaaaataaangattaaaangngctttg

SEQ ID NO: 1913 - DNA, 214 bp, Homo sapiens
gacgagctatagaaaagctattgagagtatctagttaatcagtgcagtagttggaaaccttgctggtgtatgtgatgtgcttctgtgcttttgaatgactttatcatctagtctttgtctatttttcctttgatgttcaagtcctagtctataggattggcagtttaaatgctttactcccccttttaaaataaatgattaaaatgtgctttga

SEQ ID NO: 1914 - DNA, 203 bp, Homo sapiens
actcaaacaaaagttggtcttaagcttccaccttgagcagccttggaaacctaacctgcctcttttagcataatcacattttctaaatgattttctttgttcctgaaaaagtgatttgtattagttttacatttgttttttggaagattatatttgtatatgtatcatcataaaatatttaaataaaaagtatctttagagtg

SEQ ID NO: 1915 - DNA, 408 bp, Homo sapiens
acagattaacttaacacaaaaacccgaacatcaaaatgaaggtgtgtggaggaaaggtgcagctgggtctccctacaactgttcatttctttgtggggcagggggtagttcctgaatggctgtggtccaatgactaatgtaaaacaaaaacagaaacaaaaaaaacaaggaactgtcatttccacgaaagcacagcggcagtgattctagcaggcctcagggccctgggcctggggaggctacatgagggggagcctcagtcacaggatcaacctggggcccgaaggagcagggttccctgcctctccctctgcaacagatcatcccatccaacgcaacccccaaaatgttgatgatgacgcaacatggtcaaccctcaagacctttaagacaaaacagcataggaaa

SEQ ID NO: 1916 - DNA, 310 bp, Homo sapiens
acagattaacttaacacaaaaacccgaacatcaaaatgaaggtgtgtggaggaaaggtgctgctgggtctccctacaactgttcatttctttgtggggcagggggtagttcctgaatggctgtggtccaatgactaatgtaaaacaaaaacagaaacaaaaaaaacaaggaactgtcatttccacgaaagcacagcggcagtgattctagaaggcctcagggccctgggcctggggaggctacatgagggggagcctcagtcacaggatcaacctggggcccgaaggagcagggttccctgcctctccct

SEQ ID NO: 1917 - DNA, 401 bp, Homo sapiens
  misc_feature 33: n = A,T,C or G
cagattaacttaacacaaaaacccgaacatcanaatgaaggtgtgtggaggaaaggtgctgctgggtctccctacaactgttcatttctttgtggggcagggggtagttcctgaatggctgtggtccaatgactaatgtaaaacaaaaacagaaacaaaaaaaaacaaggaactgtcatttccacgaaagcacagcggcagtgattctagcaggcctcagggccctgggcctggggaggctacatgagggggagcctcagtcacaggatcaacctggggcccgaaggagcagggttccctgcctctccctctgcaacagatcatcccatccaacacaacccccaaaatgttgatgatgacgcaacatggtcaaccctcaagacctttaagacaaaacagag

SEQ ID NO: 1918 - DNA, 375 bp, Homo sapiens
cagaaactttagcattggcccagtagtggcttctagctctaaatgtttgccccgccatccctttccacagtatccttcttccctcctcccctgtctctggctgtcttgagcagtctagaagagtgcatctccagcctatgaaacagctgggtctttggccataagaagtaaagatttgaagacagaaggaagaaactcaggagtaagcttctagaccccttcagcttctacacccttctgccctctctccattgcctgcaccccaccccagccactcaactcctgcttgtttttcctttggccataggaaggtttaccagtagaatccttgctaggttgatgtgggccatacattcctttaataaaccattgtgt

SEQ ID NO: 1919 - DNA, 375 bp, Homo sapiens
acacaatggtttattaaaggaatgtatggcccacatcaacctagcaaggattctactggtaaaccttcctatggccaaaggaaaaacaagcaggagttgagtggctggggtggggtgcaggcaatggagagagggcagaagggtgtagaagctgaaggggtctagaagcttactcctgagtttcttccttctgtcttcaaatctttacttcttatggccaaagacccagctgtttcataggctggagatgcactcttctagactgctcaagacagccagagacaggggaggagggaagaaggatactgtggaaagggatggcggggcaaacatttagagctagaagccactactgggccaatgctaaagtttctg

SEQ ID NO: 1920 - DNA, 140 bp, Homo sapiens
acataaaatatatctaactattcataatgtggggtgggtaatactgtctgtgaaataatgtaagaagcttttcacttaaaaaaaatgcattactttcacttaacactagacaccaggtcgaaaattttcaaggttatagt

SEQ ID NO: 1921 - DNA, 140 bp, Homo sapiens
actataaccttgaaaattttcgacctggtgtctagtgttaagtgaaagtaatgcattttttttaagtgaaaagcttcttacattatttcacagacagtattacccaccccacattatgaatagttagatatattttatgt

SEQ ID NO: 1922 - DNA, 451 bp, Homo sapiens
  misc_feature 33, 34: n = A,T,C or G
aatttttattattctgaccttaatttaggttannaagtataggagagaaggatagcctgttctgcatctttttgagttctgtattttggtatgaaccacctttaatagagactcatcccccatctcctaaacttaaagttataagtaaatgacttaatctagagagtaggctttctaaaagtattgccaagagatgagtaaggaagtgattcgtatataccaagatagtaatcgtgtttttcagtttataactgcacttcaaactcaattaattactaagtgatgctaattaagaattctacatatttccttactgtttctaaacgatagaacctcagatttgggaagttactgaaggccgatgctttaggaagaacagaaagttggggtatttctgtgacaacatctttttaagaaaaagagtcataagggaatttaatgaaaaagggaa

SEQ ID NO: 1923 - DNA, 327 bp, Homo sapiens
  misc_feature 23, 29, 38, 60, 77, 78: n = A,T,C or G
ggaccgtggaccgtaacagtctnctgaanggttcgtgntgatccggaggagaagaagatnacccacaacccatttgnncccggacaggtctttgatctgtccattcgctgtggcttggatcgcttcaaggtttacgccaatggccagcacctctttgactttgcccatcgcctctcggccttccagagggtggacacattggaaatccagggtgatgtcaccttgtcctatgtccagatctaatctattcctggggccataactcatgggaaaacagaattatcccctaggactcctttctaagcccctaataaaatgtctgagggt

SEQ ID NO: 1924 - DNA, 385 bp, Homo sapiens
aggagatagggtgtttcctgtatccgcctcattcccatagaaaactataagggaagaaatagaacttggaattaaagcagcagcaaggcgaggtgagaatgcgatttctaggccatcttgttgggactgatgaacagcatctctgatctcatgatttaacatctggttatccagaagggatgggattggcctaaaaaaaccgatcaatttctggattgtttttgtttcttaatccttcaaatgacaagaagcaaaaatatttgtagaaactaagcaagacaagagttggagcagttaacaccactatctgcagcagaaactcagaccttcttagtgaacttaagggctgaagtgtgaaagctgaggctgcaagtgcagatacaaa

SEQ ID NO: 1925 - DNA, 217 bp, Homo sapiens
actactaatttagctattgtgtgaggaattaaagtcttaccactacaaatctgtcttcatctgtttgggctgctgtagcaaaaaaccataaactgggtagttaataaacaacagaattaatttctcacagatgtagaggctgggaagtccaacatcaaggtgctggtagagtcaaggtctggtgagggctctacttcctgatttgtaggcagccgtc

SEQ ID NO: 1926 - DNA, 282 bp, Homo sapiens
accattttatttagtgttgtaggaaatgttgggttacttcttaaaaacgaaaccaaagaaattcaaaagtcccaaagaaagaaagcaggaaataataattctataatccaaaaacgttgggcgatccttcagttggaggaagagggcgtcagttaagtagctcacacagtagatatggagacaccatatggagatacggagttaagtttggtggatactaggaattaagttctccacctaaggcaattaatttttcagccttgagagataattagtagttct

SEQ ID NO: 1927 - DNA, 221 bp, Homo sapiens
cacgcatccatccagatgaacgtggccgaggttgacaaggtcacaggcaggtttaatggccagtttaaaacttatgctatctgcggggccattcgtaggatgggtgagtcagatgattccattctccgattggccaaggccgatggcatcgtctcaaagaacttttgactggagagaatcacagatgtggaatatttgtcataaataaataatgaaaacct

SEQ ID NO: 1928 - DNA, 572 bp, Homo sapiens
aaatggacttttctgtaagaatgtaaaactcaaaaatttgccaagtatgtatctgatccacacaaatccctagaaaggttttctgtgtagtcttcattaacgcaaatctttgtgaatgtttcactcttactgtaggatcttgaatatgttttacaataatgaagctacaaagtttttatgcagtgcattcattgtaaactataaataacatttgtattaaaaagaaagctgggtaatacaaaaataggagagactctggggagcaggcaatctgttgaggctcagtatatcttatttgctttgtagtctgctgtcattcctttcaaagagcacacagcacatgaggcatagtaatcatctgtcttgttaacctctctaatttagaaatctgttgttcgtaaaactggaccaattatcacaaactatcatttgcataattaaccgcaagtctgttacaaagcattttgttagtggtatcaacaaatgcaggaggatggacatttataaaaaatgggttttgttaagcttgccactccttagatatcatggactatactgccatttcacgattt

SEQ ID NO: 1929 - DNA, 319 bp, Homo sapiens
  misc_feature 316, 317: n = A,T,C or G
aaaaaagtttcctagccatgaagccctgctactgatttagacaaggtattatggtcattactttgtacccctatccttccaagcacttctggtacttcagtcgtttttactgatccaccaacacctaaagaggctatgctacagtctctagctaaatggaagacacattcatccttctccctctgactgctttgatcatcatttattgcatctcataactaattttctaaagtttggattgggacttttcaggtcctttttggagggcaaaggaagtgccagcttctctggggaacttgttttttttttttttttnnaa

SEQ ID NO: 1930 - DNA, 254 bp, Homo sapiens
ctgcacatacactaaacactcatagttatgcttgatatgaggaaaagccacgccgacttgaggattagctcttttgccataagcatatcgaactatggccttggtgtttcagctaaggagatggtgggctcatggtcaagaagtcattgagaggggagtctgtgaggcaaactcctacatagcccataagacccaactcaaattatcaccactccatatcacccctgccctctgtgcctgcagcatcccagagg

SEQ ID NO: 1931 - DNA, 429 bp, Homo sapiens
  misc_feature 3, 13, 24, 27, 35, 38, 45, 46, 49, 55, 68, 80, 126, 162,175, 196, 206, 209, 220, 238, 242, 248, 251, 258, 265, 283,287, 293, 306, 309, 316, 338, 361, 372, 404: n = A,T,C or G
aantatttggganagttaatttgntanctaaatanttnaagggannganattatncacctggtcatantcacccctgatnatattattactaatcttaattatttattacatcatctctttctcantggatctaatgatttaattttttcccctattggtgnagaacaataacanaagtaatttttatattatacncttggagaantanagctgaaacanaattaaaaatatttctcnaacnactgtntcncactatnaattaanctaattcatttttgtgtngacntacgangtcacaaaaatantancactganataattctaccaatgcagaganggaaacacttttcttatgtaccnggacatagatnggtaagagaaataaagaattgaagtgaattanaaaatccattttattgcttgggttt

SEQ ID NO: 1932 - DNA, 388 bp, Homo sapiens
ctgaagtgtggcttgcgtaaataactgtttattccaaaatatttacatagttactatcagtagttattagactctaaaattggcatatttgaggaccatagtttcttgttaacatatggataactatttctaatatgaaatatgcttatattggctataagcacttggaattgtactgggttttctgtaaagttttagaaactagctacataagtactttgatactgctcatgctgacttaaaacactagcagtaaaacgctgtaaactgtaacattaaattgaatgaccattacttttattaatgatctttcttaaatattctatattttaatggatctactgacattagcactttgtacagtacaaaataaagtctacatttgttt

SEQ ID NO: 1933 - DNA, 445 bp, Homo sapiens
  misc_feature 155: n = A,T,C or G
aaagaactggttcatgaaattagtgttagttcataaattgtttaagaagttccttttccattgaattagattgctgtaaaagggagaaaaagggaagcttcccataagaatagtttgaaaacaaattgacttgttcatttccatattatctgctngatgatatggagccagtgtcaatttttctgttagtgaatgttttggactagatgttcccgtccccaaaatttatatgttgaagcccttattaatgtgatggtatctggagatggggctcctccaaccatcccatcctggaacatataagccagaaagaaagtagtctccagaaacagaccatgctgacaccttgagtttgaacttctaatcaccagaactgtgaggaaataaatttctggtgtttctgtttcataggctggagatgcactcttctagactgctcgagaca

SEQ ID NO: 1934 - DNA, 521 bp, Homo sapiens
caggatggcccacaagcagatctactactcggacaagtacttcgacgaacactacgagtaccggcatgttatgttacccagagaactttccaaacaagtacctaaaactcatctgatgtctgaagaggagtggaggagacttggtgtccaacagagtctaggctgggttcattacatgattcatgagccagaaccacatattcttctctttagacgacctcttccaaaagatcaacaaaaatgaagtttatctggggatcgtcaaatctttttcaaatttaatgtatatgtgtatataaggtagtattcagtgaatacttgagaaatgtacaaatctttcatccacacctgtgcatgagctgtattcttcacaacaacagagctcagttaaatgcaactgcaagtaggttactgtaagatgtttaagataaaagttcttccagtcagtttttctcttaagtgcctgtttgagtttactgaaacagtttacttttgttcaataaagtttgtatgttgcattt

SEQ ID NO: 1935 - DNA, 584 bp, Homo sapiens
cctacttacaagcctccagtctcaaattatccaggatatcctaaacctgaggaaggaatacttgacagtttggatgtttgggtcattgctgtgattgttattgccatagttgttggagttgcagtaatttgtgttgtcccgtacagatatcttcaaaggaggaagaagaaagggaaagcagatggtggagctgaatatgccacttaccagactaaatcaaccactccagcagagcagagaggctgaatagattccacaacctggtttgccagttcatcttttgactctattaaaatcttcaatagttgttattctgtagtttcactctcatgagtgcaactgtggcttagctaatattgcaatgtggcttgaatgtaggtagcatcctttgatgcttctttgaaacttgtatgaatttgggtatgaacagattgcctgctttcccttaaataacacttagatttattggaccagtcagcacagcatgcctggttgtattaaagcagggatatgctgtattttataaaattggcaaaattagagaaatatagttcacaatgaaattatattttctttgtaaagaa

SEQ ID NO: 1936 - DNA, 210 bp, Homo sapiens
  misc_feature 9, 16, 24, 25, 51, 57, 71, 81, 96, 97, 119, 137, 165, 170,176, 179, 183, 188, 191, 194, 196, 204: n = A,T,C or G
atttaagantgaaaanacacacanngtggtcttgattctcactcactcacnatctcnctgtgcagaggggnctgtttctangcactggaaccttannccatgctgggatgcttctcaangtgctctctcccactgancagccatctttggtggtattaccacaangtttnccccanccnctcncactnctnagnanggaccatnggacgg

SEQ ID NO: 1937 - DNA, 532 bp, Homo sapiens
aaagtgagcagattcatatttacagtgtgatttttaaggactgtctatatccaaattttattttcgtgaacgcttacattctaagagcagtacaattagcctattacgtagggccctaatcttgttagtatagtgttgttgaaatactttcttcagcttttgccttaacaaatccaaagatggaagatgatgacaatctggaatattcaacataacatgaaaaaattcattccacatatccaaatgaggaagccttctaaaaagaccttcaggcttacactctcctccttcatttttcactttcatgtaagtgccaaagagcatgcaatatactgttgcagcaaccccaaagtaatcgatctggtagttccatggtttgttgctgaggatctcaacacactgaaaaccagatgtttcacactttgctgtgaatatagttccttttggaaaaagtttcatatctatactctgacccaggtcaatcaagtgccaagccagcagataaatcatcttcatcatcctgtccaaaaat

SEQ ID NO: 1938 - DNA, 538 bp, Homo sapiens
  misc_feature 439, 537: n = A,T,C or G
ctccgttctaaggttgatgaagctgtagctgtactacaagcccaccaagctaaagaggctgcccagaaagcagttaacagtgccaccggtgttccaactgtttaaaattgatcagggaccatgaaaagaaacttgtgcttcaccgaagaaaaatatctaaacatcgaaaaacttaaatattatggaaaaaaaacattgcaaaatataaaataaataaaaaaaggaaaggaaactttgaaccttatgtaccgagcaaatgccaggtctagcaaacataatgctagtcctagattacttattgatttaaaaacaaaaaaacacaaaaaaatagtaaaatataaaaacaaattaatgttttatagaccctgggaaaaagaattttcagcaaagtacaaaaatttaaagcattcctttctttaattttggaattctttactgnggaatagctcaaaatgtcagttctgttttaagtaacagaattgataactgagcaaggaaacgtaatttggattataaaattcttgctttaataaaaant

SEQ ID NO: 1939 - DNA, 466 bp, Homo sapiens
  misc_feature 360, 466: n = A,T,C or G
ctgcaatctccatgaagaaggggttgagaatccgaatctgtttaggattgacatcccagatgaggggaggctgtttccagaaaccctttcgcacccgcttcttatcactcaggatggtctcaatccagtggaagtccattgccttgaaagctaccaggacgaggagtgtgtctgggttgttttctactttggggtcgaagtgggcagattcagggtagaagagacgcatggtggtcttggagcccacgtcaccctcatagccagccactggggcattgttcaatctgatgaccacatcgtacttgttgatggcatctcccagtgagctgttccgcagccggtgcccgttccccacgaccncacagcggcgggacctgaggctctggatgttcttggggatggaggagctggtgatggctagcacccggaggagcagatcctcactccccttggtcccatagggcan

SEQ ID NO: 1940 - DNA, 316 bp, Homo sapiens
ccttgcgccggcagcttccagttacccgcaccaaaatcgactggaacaagatactcagctacaagattggcaaagaaatgcagaatgcttaaaggctgaatgtaggattcttcagtatgtggaaagacaaggattcaacgtgtggtcatatgataaataagtgatttataaacaagagtgatattttgctagggctttcaaagttaaccggttttctagcctcatggaatactgttgaacctatagcgttgtcttgattcttttgtgttctctgccttgtaattttctgttactgctatatctacgtgtaaatctt

SEQ ID NO: 1941 - DNA, 222 bp, Homo sapiens
ccacaccccgccccacagatcccatacccacctctgaggtcaactaaggcaggtcactcagagatcaggaccagtgcttcccaccaggctttccttgaccccacttctggctgtcctgcgggccacaagctcttcaggccaagtcagagctgctgttgctgccacttggatggggacctgaaaaagagaatgttgatagccccagctaagacccccaatcag

SEQ ID NO: 1942 - DNA, 617 bp, Homo sapiens
aaagaaaatgggcagagaaacacaatataaatcaaagaatatgccactgtacaaggtttattatcattatcatggtccttaatgttactgaacctttactatagtaataaatacagttctatatttacacatcttataaaacatctcataaatgtattttttcaaatccaagttaaaacatctgatcaaaataaacatgcttatataaaaataaatctacctaacagccatttggtttggatgtattgaagctaatataggataatagaaggtaagaattaatactttgacttttcttatttaataacttgcttcttaaaatacctaacacagtattaatatggaataagcagagaagtaatgttcctaacatcaagtgggttatccagagagaacacagctaaaaccaagctaaataaacaggataatacgttactgagtctcttgagtccaaagtggtgccagatattgggtttgccagagctactagagatacatgtgtaagaagttgtatcagtggacttaatttatgtaatgtgcacatttgatcattaagatgcacatcagtttgaatcaactgataaaacttattgcaaaaattctttactaacccagaa

SEQ ID NO: 1943 - DNA, 252 bp, Homo sapiens
  misc_feature 2, 3, 4, 15, 19, 27, 29, 57, 63, 80, 107, 118, 146, 168,175, 185, 186, 188, 196, 209, 218, 222, 231: n = A,T,C or G
annnggggccgcccngacnggtccagngnccgctttctcccttaaaaaaaattctgnggctgngcagtactttgaagttntaattattaacctgctttaattaaagnagtttcctttnttataaagaggaatcaccaaatcttatnacacagagcacagtcctgtagntacccancccgctccannantgcggganattgtaaggaagnggaggtggntggngaagcaagnctcacatgtcggcgttcttgg

SEQ ID NO: 1944 - DNA, 267 bp, Homo sapiens
ctggttccagaaggaccctctgaggctggtcttccgggtaggatgtgctgtgggagggttctgtttccgaggaggagaggcgcgacacagcgtgcaaggacctgcagcaccttccacgcagcaccccctgctcctcctcctcagcccctgccgggctctgactcctaagtcaggcaggagcttcttcaggcccctggctgaggaagagccacagccaccctaaaatggcttcgggggcatgcagccctccatctccagcagctctgg

SEQ ID NO: 1945 - DNA, 348 bp, Homo sapiens
cctccacttcataatccggataccactcaattggagtggaatgagaagccctgtattctgtgatgttcaccagatattccttggtaatcactttattctggaagtaggggttactccgaaagaacaacatgatcttgcagagatgaacaggatgcttctcttcttccacctccaggctgaccatgtagctcagcatttcttcatcttcgtcagtgatcagggctgacatctgggggtggtttgcaagaacattggcccagaagccagggacgctctggatgacggcgcctctgcggtctaggtggggcttgcgcctccgctccatcttttcctgctgccgagaaaagg

SEQ ID NO: 1946 - DNA, 352 bp, Homo sapiens
aaaggcagacactgagtcagtattaatagattaactaaactgcactgtaatttagataaaattactgtgtctcactgtgtattacatgcaaaatccacataaattgtcatttaaccaacagtactgcacgagcgaacatctcgatatatgaaaactgcatcatcaattcaacgttttggtacttgaaactgcatcataaatgcaacattgtcacatgtgaaaacgacaccctaagtccttctttttaaaaatgacattgcgtttagcttattgtaagaggttgaacttttgtattttgtaactatctttaagctcttcagtttataattcatataaaatgccttttgtattt

SEQ ID NO: 1947 - DNA, 320 bp, Homo sapiens
  misc_feature 32: n = A,T,C or G
ggacgctctcagctctcggcgcacggcccagnttccttcaaaatgtctactgttcacgaaatcctgtgcaagctcagcttggagggtgatcactctacacccccaagtgcatatgggtctgtcaaagcctatactaactttgatgctgagcgggatgctttgaacattgaaacagccatcaagaccaaaggtgtggatgaggtcaccattgtcaacattttgaccaaccgcagcaatgcacagagacaggatattgccttcgcctaccagagaaggaccaaaaaggaacttgcatcagcactgaagtcagccttatctgg

SEQ ID NO: 1948 - DNA, 362 bp, Homo sapiens
  misc_feature 36, 54: n = A,T,C or G
ccaacctctcagaatatgagtattattcagaagaanagagaaatgccaaagcanagaaggaaaagaagcttcccccaccaccccctcaagccccacctgaggaagaaaatgaaagtgagcctgaagaaccatcggggcaagcaggaggacttcaagacgacagttctggagggtatggagacggccaagcatcaggtgtggagggcgcagctttccagagccgacttcctcatgaccggatgacttctcaagaagcagcctgttttccagatattatcagtggaccacaacagacccagaaggtttttcttttcattagaaaccgcacactgcagttgtggttggataatccaaagattcag

SEQ ID NO: 1949 - DNA, 324 bp, Homo sapiens
ttgttttccatcatttggttgcgctgacctaggaatgttggtcatatcaaacattaaaaatgaccactcttttaattgaaattaacttttccaaagattctcattcctgagaagcaaaaattaggtgaggtaacttgtcagaggaagcaaattcagggctcactagagagcacagagcatttgtccatcagcagttcagtcatcgccagctctcctggtaccctcgaacacttcagaaacacacacaagtcaagtccctcgatggctacactaggcgcctatggctggagcctccttggcacgagcgcaccatccgaggcacag

SEQ ID NO: 1950 - DNA, 301 bp, Homo sapiens
gtctcgaactcctggcctcaagtgatctgccgcctcagcttctcaaagtactgggattatataggcatgagccactgagcctggccctgaagcgtttttctcaaaggccctcagtgagataaattagatttggcatctcctgtcctgggccagggatctctctacaagagcccctgcccctctgttggaggcacagttttagaataaggaggaggagggagaagagaaaatgtaaaggagggagatctttcccaggccgcaccatttctgtcactcacatggacccaagataaaagagtgg

SEQ ID NO: 1951 - DNA, 153 bp, Homo sapiens
aaaaaggtttatgtgtgtcgaggcagttgtaaaagatttactgcagaatcaagcccacttttaggcttaggaccaggttctaactatctaaaaatattgactgataacaaaaagtgttctaaatgtggctattctgatccatagttgtttttt

SEQ ID NO: 1952 - DNA, 427 bp, Homo sapiens
aaaaaacttcgaaagtcacagacacagaatttaggaagctgaaggctgagagtctcccttctcacttaatccatgctttattttgcattcctcacaggtaaggaggcagtgcctgttatgctgtggaccaaaaccagccccacggagctgatcttcaaaaaaatggaatttactctggcatactcctatgtatgatacctttccaaggccaaatcccaagagaccagcaagtgcaactttgggcaatgatccaaatctagaattagcttgccaaataaccttggtagactagtccctgggtgacaagcatgcttacaagagaaaaaggcagagcttgctttgcttggtggtggaaaatggcatctttatcttggtttccacgagcagacgctgaagccatgatgactttggctgctctccttccagt

SEQ ID NO: 1953 - DNA, 435 bp, Homo sapiens
cctatttgctaccagacaaaggcaaaatgggcaagaagaaaacactcgtagtgaagaaaaccttgaatcctgtgtataacgaaatactgcggtataaaattgaaaaacaaatcttaaagacacagaaattgaacctgtccatttggcatcgggatacatttaagcgcaatagtttcctaggggaggtggaacttgatttggaaacatgggactgggataacaaacagaataaacaattgagatggtaccctctgaagcggaagacagcaccagttgcccttgaagcagaaaacagaggtgaaatgaaactagctctccagtatgtcccagagccagtccctggtaaaaagcttcctacaactggagaagtgcacatcttgggtgaaggaatgccttgatctaccactgctaaggggaagtcatctaaattctttt

SEQ ID NO: 1954 - DNA, 478 bp, Homo sapiens
ctgctgaccgcctggtgcttcaggagctgggtgctggggaagccacatgcactgcggcgtccagaggcagaagcacaaccaacaagaaccacgaaggaggcgcctttcctcctataatgcctgtttggtgccctctactgacaaagcttatcccctttcaaaaaacagccaactgaaaaagctgaatttggaacataaagtcaataaatccataaccagcaatactatggggcctggggtgcgctggcctttagtgagtggagtggggcgaaggatgctgcatgtcctgcagtgggcacagcggccctgcacgggggagaaccatccctgtaaagtgtcagtagtagcccctgtgtcagtcagggtccctgcaagaaatggcagtgcactcacataaggacagtttgagaagagtctcctgacaaggtgagtgtggctctctgcggctactaacagcctgagcctttaccttcccagg

SEQ ID NO: 1955 - DNA, 217 bp, Homo sapiens
  misc_feature 191, 198, 200, 213: n = A,T,C or G
ctgtggtcccactcgtatatggtggtgagaccaaaatggtggaaacagccttaaccccagatgcctgctatcctgactaatttaagtcattgctgactgcatagctctttttcttgagaggctctccattttgattcagaaagttagcatatttattaccaatgaatttgaaaccagggcttttttttttngggggangnaaaaccaactccntgcc

SEQ ID NO: 1956 - DNA, 288 bp, Homo sapiens
cctcggggatggtgaatccccggtacttcttacacaccacctgtactatgtgtaactttggcaacaggttgcagtcagccagggtgagctcgttgccatccaaaaacttcctctgagagacaccttcatcttcagcactggtttcatccacttcttctgggaggggggatgttaagtaattgtctaaaaccttcagggctttcaggagtcccttctccagattgtcattgagtgctgggtttgaattcttgatgtaggcagaaaatttggcaaatatgtccagcccag

SEQ ID NO: 1957 - DNA, 480 bp, Homo sapiens
aaaaagcaatcctcaaactctctagccacagcagtaattaagattaaggtctgtcagtgggctgatcccctccaggtagcctccctcactccaagagaagatgcagagaaatatggatgacacatgcttgcattgtttttgtgtcaaaacacacacacacccacacacacacaatataaggcagcccaaaggtctgtggcagaaaacactgcaaatgactcagtgatacactacatttgcaatctctcatttatacaaaaaaagaaacaagtttccagtttgctttcaacaaaaacaacaaagaaaaaagggatggacaaaaaggcatttatacaaatctagggtgaggaatacaaagaaacttgcttttaataataaaaaaagattaaagagataaataaaaaaaaactggttacagttaagaacataatttaacaacagatgaccataccctttgaggaaagctccacaacctatttt

SEQ ID NO: 1958 - DNA, 499 bp, Homo sapiens
ccagtataatgctatttttaagactatacagtatgtacgtgcacacacacacactgtcatgtgcacagaaacatacaatgtgtattctcatcatcagtggtccaatttaatgaatcacacagattgaaagggttcaagtcttaaagaagttatgagcaccatagctggtgctcagactgtgcatgtatctttggatcaatgagttgttgaaagtctgctgggtgcagtaaagtacagaatacagaacatcaatgtttaatgttaatacggtaggcaaagagacccagtcagtttcctgggttgctttactggacggctgatgaactaggtactctgttcacttggtaaattctcagaagccagattgactctctatgtatcttgttttatcaggattgtttgcatagcttgctaaaaggcacctaagcagcagcatcatctctatgtcttcagtaaattgtggaacatttctaaaatactcctggaagcagagacagtg

SEQ ID NO: 1959 - DNA, 432 bp, Homo sapiens
cgcactagaaagttcatgaccaaccgactacttcagaggaaacaaatggtcattgatgtccttcaccccgggaaggcgacagtgcctaagacagaaattcgggaaaaactagccaaaatgtacaagaccacaccggatgtcatctttgtatttggattcagaactcattttggtggtggcaagacaactggctttggcatgatttatgattccctggattatgcaaagaaaaatgaacccaaacatagacttgcaagacatggcctgtatgagaagaaaaagacctcaagaaagcaacgaaaggaacgcaagaacagaatgaagaaagtcagggggactgcaaaggccaatgttggtgctggcaaaaagaagtgagctggagattggatcacagccgaaggagtaaaggtgctgcaatgatgttagctgtgg

SEQ ID NO: 1960 - DNA, 442 bp, Homo sapiens
aaaacttaaatttcactggcaaaagtaggtaacagaggagacacagattcagtgcaggattttatatacaataaaacctaaaactaaactccaccaaaatgaaattgtaatagtcaatgcctggctagaaatctccctttgcacagtgaaaaggtcacattacaagaataaaataatagcaagaatgcagtctacacactttagatgttcaggaaaacaacagtttccaagcaccacatgaacacttaattaactggagataatgttaaagcaaggtctctacaattttccattaggttgtgcttcaaatagtctataataaggacttgaattaattacattttattgcactataaattgctgttgcattatacccaaatgtaacaaataaggcagactttaatttctctgtggacctccttggatagaagataagtaattt

SEQ ID NO: 1961 - DNA, 174 bp, Homo sapiens
aaaaaacaactatggatcagaatagccacatttagaacactttttgttatcagtcaatatttttagatagttagaacctggtcctaagcctaaaagtgggcttgattctgcagtaaatcttttacaactgcctcgacacacataaacctttttacctgcccgggcggcaaaggg

SEQ ID NO: 1962 - DNA, 513 bp, Homo sapiens
ccttctgtcccaggaagccaatgttcatttgatgtggaagagggacctgtgtttaaccagaagctgtcctccctcatccctttcccatggcttacacgcagaagggggaggagatgaccagaggagaaatcaggggaagaaaaggcaacaggggaggcaaagggaaaggagaggaatgcttaaaatatacagtgaaatttgagtaggattctctactcaaagacttctctgggaagtgtccagaattgaccacacaggtgctgacggtagaaagaacacagacccaaaaccctgatctagttgcattaactccattagccctgagttcctctgtaaaatgaagactgtggaggcaccaactagaggatttctgtgaccttctcaaactctaaaatttttggcactggactgttccactttgaagggtcaagaaagaaatctggaggttgcagaaatcagggtcaggcgcacatacacgcacgcacgcacacacacacacacacacacacacac

SEQ ID NO: 1963 - DNA, 696 bp, Homo sapiens
  misc_feature 656: n = A,T,C or G
cctacttacaagcctccagtctcaaattatccaggatatcctaaacctgaggaaggaatacttgacagtttggatgtttgggtcattgctgtgattgttattgccatagttgttggagttgcagtaatttgtgttgccccgtacagatatcttcaaaggaggaagaagaaagggaaagcagatggtggagctgaatatgccacttaccagactaaatcaaccactccagcagagcagagaggctgaatagattccacaacctggtttgccagttcatcttttgactctattaaaatcttcaatagttgttattctgtagtttcactctcatgagtgcaactgtggcttagctaatattgcaatgtggcttgaatgtaggtagcatcctttgatgcttctttgaaacttgtatgaatttgggtatgaacagattgcctgctttcccttaaataacacttagatttattggaccagtcagcacagcatgcctggttgtattaaagcagggatatgctgtattttataaaattggcaaaattagagaaatatagttcacaatgaaattatattttctttgtaaagaaagtggcttgaaatcttttttgttcaaagattaatgccactcttaagattattctttcaccactatagaaagnattttatatatcgttcattgtaaaaagcccttaaaaatat

SEQ ID NO: 1964 - DNA, 604 bp, Homo sapiens
  misc_feature 604: n = A,T,C or G
aaaaaaaaattaaaacatttgaatgaactgtaaagtacagccataccttggacatgcaaatataaatctatggagcattctcaagacagtttgtcatggctctgttgattgcaactccttgtatagcttgtattttgatttagtttatattctgcttattatgtatactgtgttcttatatatgagaaagcacaaatgcgaaagaggtcatgtcttctcaaaatctagcaaaggaagtagtctgcattggtgtgcattacagtattttgcttaatgaaagcctcagttctgaatgttgatatgagtagttaaaagggagtggggccattttatgtgtttatctgtgtcaagtatttctggtaataagaagcacttaatttacacatattttaatcctgtgaaagattccacatagagaaaagaaagatacctaaccttcaacaaatgttatttttggaaacacaatttttgtcattaaatgttatattatttcacatatataaaacagatgttatgtaagaatgttgtatattttaacataaatcatttagagaaattatctagattcattaattttcatagtgcctttttcacatgagtcaan

SEQ ID NO: 1965 - DNA, 588 bp, Homo sapiens
aaagttcacataatcatctgtaagacattatgtattttgtggaaatactagaatttttttcctgattttgccattatatggatttgctattttttgattaatgcaaaagtatatgactttgttttttatgtgatacaccataaatattaaagtgttgaatactaacagtgctgactacaagaaggatgtagtattttggctttctgcattacaacgtcttctggaggaagggagcaggatgggtttcatttgtatctagtgtgtgtcttaacatctttctaaatcggcagtgtaactgcatagtttaacttcctgtctgtctccctcattttactcttccctccttgtcttatgttttggcttttgtgtatcagagcatctttctttgcagcatcctagtcttgcttcagtttctgtggtctcttttcatcctgcttgaagattcggagtgtggaaggaggctaggaagtctggtgcagtaggtgagcagacctcttgctgcccacccagggtgggtgggcgcacacctgtctttggcatgcaaatctgatacacctggcgcatcctccggagagcacaacgcatggg

SEQ ID NO: 1966 - DNA, 191 bp, Homo sapiens
ccactgctgctgcagccaatatcctctctgggcctgggaccctctccacagaggggatgtggtccctggtcatgacataacctagcagcagtaggaaaaactcccttctatgaaggggaagcagactgggccataaggaaacagcaggactggctcaagtgcccaaggtttgtttagggcctgggaattgg

SEQ ID NO: 1967 - DNA, 432 bp, Homo sapiens
ccatattagattactggaacatctaagcatcagtgtgtgaccatgcgaacaaaagacttcggggagtgtctatttttaaaaaggtttatgtgtgtcgaggcagttgtaaaagatttactgcagaatcaagcccacttttaggcttaggaccaggttctaactatctaaaaatattgactgataacaaaaagtgttctaaatgtggctattctgatccatagttgttctttaaagaaaaaaaatgtatatacagaaagagtataaaagtttgtgaatttaatgcaaattagcttccagtcttcacttcccaaatacttgatttatagttttgactcctttacatttttgccttcttaatttcaagatttgcaattttgccttcaaaacagatcatttttttaaattgtaaaaagtattcaacatatgcagaaa

SEQ ID NO: 1968 - DNA, 354 bp, Homo sapiens
  misc_feature 20, 220, 272, 313, 320: n = A,T,C or G
ctggaacagtatatgaaganctgaggtataagctctcgctagagttccccagtggctacccttacaatgcgcccacagtgaagttcctcacgccctgctatcaccccaacgtggacacccagggtaacatatgcctggacatcctgaaggaaaagtggtctgccctgtatgatgtcaggaccattctgctctccatccagagccttctaggagaacccancattgatagtcccttgaacacacatgctgccgagctctggaaaaaccccacngcttttaagaagtacctgcaagaaacctactcaaagcaggncaccagncaggagcccctgacccaggctgcccagcctgtcc

SEQ ID NO: 1969 - DNA, 290 bp, Homo sapiens
  misc_feature 4, 75, 108, 265, 276, 287: n = A,T,C or G
ctgncgggtctctagttcttgcacgctctttaagagtctgcactggaggaactcctgccattaccagctcccttnttgcagaagggagggggaaacatacatttattnatgccagtctgttgcatgcaggctttttggcttcctaccttgcaacaaaataattgcaccaactccttagtgccgattccgcccacagagagtcctggagccacagtcttttttgctttgcattggaggagagggactaagtgctacagactatgtngcttttctganctaccgagagngct

SEQ ID NO: 1970 - DNA, 393 bp, Homo sapiens
ctgtctcatatgtccagcaccgggcaacgttacgaatggtgtaaccaccgcctcccagcatcagcataggcaggttaaagctcttgacaaattccacacacttggcgtgtcctttgatagttagattgaagcaacctaaccgatccccagatagggagtctgagccacactgtaagaccaccgcactaggctggaacatctccattactttggacatgaccggcttgaaaatggcctcataggactcgtcatcaatcccgtctcggagcgggtagttaacagcataatacttgcctttgccagccccgatatcccgtaggtccccagttcctgggaagtactctccatacttatgaaaggacacagtcatgacccggtccgcggtgtagaagg

SEQ ID NO: 1971 - DNA, 454 bp, Homo sapiens; identical to SEQ ID NO: 509

SEQ ID NO: 1972 - DNA, 487 bp, Homo sapiens
ccatctaaataggataacagtaaaaatggctagggggaggcatgggttttgcttcccagaattataaaatacctggaaaggaattaatctcattcctatacaggaaaaccaaatattctttctagagaacagcagaacaaagtagaacatctactacggctgtctcccagcctcaatctgacttcaagaataactttacatctgccattgtcatgaaccccagcttcctcagagaagccagggcaccatgcttctacacggccatggaagcaggttgccacttgtacccaaacctgtagagagtgagggtttcttatctcccctcccctaggagcaggaattgcaaatagcatcattgtattaatatgattggtaaatgtttgaacaacttggaaataaagttctcaagttcctaccagcaatatgagtctgtgtgtgaggagagaaatggggtgggggaaatgcctctcatttcccatacttcttt

SEQ ID NO: 1973 - DNA, 120 bp, Homo sapiens
  misc_feature 34, 35, 118, 120: n = A,T,C or G
aatgttttatttcatagctcataaaaaagtatgnntgtacaagactcaagtaaatagaaaggcagctttcaatcacaaatcagtttttcagatctaatgtaaaatccagaacttggantn

SEQ ID NO: 1974 - DNA, 1212 bp, Homo sapiens
atctagaggagggccgtctgtgaggccactacccctccagcaactgggaggtgggactgtcagaagctggcccagggtggtggtcagctgggtcagggacctacggcacctgctggaccacctcgccttctccatcgaagcagggaagtgggagcctcgagccctcgggtggaagctgaccccaagccacccttcacctggacaggatgagagtgtcaggtgtgcttcgcctcctggccctcatctttgccatagtcacgacatggatgtttattcgaagctacatgagcttcagcatgaaaaccatccgtctgccacgctggctggcagcctcgcccaccaaggagatccaggttaaaaagtacaagtgtggcctcatcaagccctgcccagccaactactttgcgtttaaaatctgcagtggggccgccaacgtcgtgggccctactatgtgctttgaagaccgcatgatcatgagtcctgtgaaaaacaatgtgggcagaggcctaaacatcgccctggtgaatggaaccacgggagctgtgctgggacagaaggcatttgacatgtactctggagatgttatgcacctagtgaaattccttaaagaaattccggggggtgcactggtgctggtggcctcctacgacgatccagggaccaaaatgaacgatgaaagcaggaaactcttctctgacttggggagttcctacgcaaaacaactgggcttccgggacagctgggtcttcataggagccaaagacctcaggggtaaaagcccctttgagcagttcttaaagaacagcccagacacaaacaaatacgagggatggccagagctgctggagatggagggctgcatgcccccgaagccattttagggtggctgtggctcttcctcagccaggggcctgaagaagctcctgcctgacttaggagtcagagcccggcaggggctgaggaggaggagcagggggtgctgcgtggaaggtgctgcaggtccttgcacgctgtgtcgcgcctctcctcctcggaaacagaaccctcccacagcacatcctacccggaagaccagcctcagagggtccttctggaaccagctgtctgtggagagaatggggtgctttcgtcagggactgctgacggctggtcctgaggaaggacaaactgcccagacttgagcccaattaaattttatttttgctggttttg

SEQ ID NO: 1975 - DNA, 1722 bp, Homo sapiens
tttctgttatgccttttcatttctattcagataagatgtggatattgtgagtttctggcttgaaagctagaactgaggggttttttttgtttgtttgtttgtttgtttgttttgagatggagtctcgctctgttgccattgcactccagtctgggcgacaagagtgaaactccgtctcaaaaaaaaaaaaaaaaaaaaaaaaaaaagagcaatgtccttggatgtggtggtgaagggatttcagaataacatactcactggagcatggtgggatgtaccgccctagttgaagaaatcgtgatgtaacattgacagtcgttgggtataatgtgataacaggagcaagaaatgagtaatcaataaataccaattttattgaaataacagtgtttatttctctaaagaaagtaggagaatgagtctttagacttaaggagcatatactttaatgaaagagacagtacagatatcgtagaacaagtgactgaaagcacatgtctatttgtaaatgtctagaaagaaacattcaccctgagactaatcagtctgtgtagctatttagtgaatatttttcagtcaagggaaggaattaagactttaaatttaaaaaacaaaattgatctgggagcagcggcttgtgcctctaagcccagctactcaggaggctgagtcaggaggattgcttgaggccaggagtttgagaccaggctggagtgcagtggcgcaatctcggctcactgcaacctccgcctcccaggttgacaccattctcctgcctcaccctcccaagtagctgagactacaggcgcctgccagcacgcctggctaattttttgtatttttagtagagacagggtttcaccgtgttagccaggatggtctcgatctcctgacctcgtgatccgcctgcctctgcctcccaaagtgctgggattacaggcgtgagccaccgcgtccggcctctttttttcttttcttttttttgagacaaagtctcactgtgtcacccagactggaatgcagtgacacaatctcggctcactgaaacctctgccttccaggttcaagctattctcatgcctcagcctctcaagtagctgggactacagatgtgggccaccatgtctggctaattttttttttttttttttttttgtagagacagggtttcgccatgttgacgagactggtctcgaactcctggcctcaagtgatctgccgcctcagcttctcaaagtactgggattatataggcatgagccactgagcctggcccagaagcgtttttctcaaaggccctcagtgagataaattagatttggcatctcctgtcctgggccagggatctctctacaagagcccctgcccctctgttggaggcacagttttagaataaggaggaggagggagaagagaaaatgtaaaggagggagatctttcccaggccgcaccatttctgtcactcacatggacccaagataaaagaatggccaaaccctcacaacccctgatgtttgaagagttccaagttgaagggaaacaaagaagtgtttgatggtgccagagaggggctgctctccagaaagctaaaatttaatttcttttttcctctgagttctgtacttcaaccagcctacaagctggcacttgctaacaaatcagaaatatgacaattaatgattaaagactgtgattgccaccaaaaaaaaaaaaaaaaaaaaa

SEQ ID NO: 1976 - DNA, 2735 bp, Homo sapiens
attttttcagagatcacatgtggtttgagggaggatagagaggacagggtgtcaagaacagcatttttaccaagttgatataaaaatgaaacaggatccaggcatgggtctttacactgatagttacagtaagttttaaaatctgagcagcaatttgaatcacttcttgaaaaacacacaaaatatattttttgtagaggtgggggtcttgctctgttgcccaggctggtcttgaactcgagattctcctgctttggcctcccacaagtgctgggattacaggcgtgagctactgcacccggcctgctttctttttagtgaaaaggatctgtgggagcttttattcccatggctgccttcctcaagtcaacctctttccccggaaatggcatcatctctggactgttgtttctccttcttccttctcctccttctcctcctcctcctcctccaccatgcccggctgatttttgtatttttagtagagacagggtttcactatatgggccaggcagatctcgaactccaaacctcgtgatccacctaccttggcctctgaaagtgctgggataccgtggcctctgaaagtgctgggattacaggcatgagccaccgcgcccggccccgttgtttcccttctaagaaacgcagtggtctctgaagcctgcaggggcaggccagccctgcactgaacgcctgttcttgccaggtggcagaaggttgctgctcatttgagcagtacctgtcacccctcctcccactgctgcggctgttaactcatcttcaggtctcacaccttctgcacataaataagctatttttaaaagttattatttttttactctttcttttctttggagagggtaccaaaggatagctgttctgtttaagtagggacctctcatggcctacaggctttgacatctgagaatcaaactggagaacattccgaagccgttcttataagtgtctccatctctacctgggctgaaatggaatgtgcaaatgtagcccagcctggtccttgggtgttgccagttgattgatgactgggagccaaagtggcatctcctttgacctaaacgggcgatgatgaaataaaactcaacagcctttctctcatcttgcattgtgagatgcgaaatagagcgtgtctctctgcctctcgttttaggctgaggccgtccaaagcggccatgccccatgtttccactagatggcgctgacacttcaggcatcaaccctcatggcctctcagccttgcaaaggcagccacttaaagtcggtgtcctgtgtggggcaccaagctgagctgcagacacccagtaggcgcgaggcaaatgcgtcccattttaagaggcttgtatttatgagctctttgcttcctccctcccactatctttaaagaattgctctccatctcctttggcaaagttcctttgccctttgtcttatttttgtgaaaccctccaaggtatttccagtccatttgcatccaatctggcatctttacggagagcggtctcatatgctattgttgttaacgtgtactagtatttatgtgttgagaacactggctgtttgtcaggaaaagtgtgccaaaacaaagagtacggccggccctggaaatgcatcagcaaaacccatttcccccgtgcactcattctgagcttccttccttcatttctgtcattactgctgagaactggactgtgcccagctgacctttcccttccttgccctcatcttgctgccagggtctgcaggtttgccaccgtcccggccccagtctgaaacatgggattatttcagaattggaggtggcagcttcagaaaaaaatccttctcgtgtgttgactgctgagatccaggaactgggaaatcaacccccagtttgtagattgctctctttggaaattctgtggcccaacctcgtggctgttttctggaattccttctatcggggcagacagtgctgtgcctttcttgacttcaggatgttccaaggatgctgctggatctgtgtgtgtgtgtgtgtgtgtgtgtgtgtgtgcgtgtatgtgcgcctgaccctgatttctgcaacctccagatttctttcttgacccttcaaagtggaacagtccagtgccaaaaattttagagtttgagaaggtcacagaaatcctctagttggtgcctccacagtcttcattttacagaggaactcagggctaatggagttaatgcaactagatcagggttttgggtctgtgttctttctaccgtcagcacctgtgtggtcaattctggacacttcccagagaagtctttgagtagagaatcctactcaaatttcactgtatattttaagcattcctctcctttccctttgcctcccctgttgccttttcttcccctgatttctcctctggtcatctcctctcccttctgcgtgtaagccatgggaaagggatgagggaggacagcttctggttaaacacaggtccctcttccacatcaaatgaacattggcttcctgggacagaaggccttcaaaggagggattgcaaagcaaggcaaagcgttctgtcttcattttccccatccccatgagacaagactgatggagagggtggtggggcaacactgcttaatggatgccttttcacatcatttcagtttttagccctcatgactgtattttctaatcagagacaataacattttaaataaaacaacgacaaagaagtctg

SEQ ID NO: 1977 - DNA, 251 bp, Homo sapiens
ctgcgcacacctgaacctgctccttggcagagatgaagggcgtcatgtttcgtagccactcaacacccatggacaatttggctccttgtaaagacttagtcatgcctttgaactgacttacttgaaatataattgctcctattttgctccaaagaccagtggcatgatgggttagagttatttgtatttattgagattgttgtaattagcaatctcagggctcagtctaactgcattatccatgctggaaa

SEQ ID NO: 1978 - DNA, 183 bp, Homo sapiens
  misc_feature 131,158: n = A,T,C or G
cttgaagccaagggttaacccagcaagctacaaagagggtgtgtcacactgaaactcaatagttgagtttggctgttgttgcaggaaaatgattataactaaaagctctctgatagtgcagagacttaccmgaagacacaaggaattgtactgaaganctattacaatccaaatattgccgct

SEQ ID NO: 1979 - DNA, 899 bp, Homo sapiens
cttcattctgtggaattttgtgcttactactgtatagtgcatgtggtgtaggttactctaactggttttgtcgacgtaaacatttaaagtgttatattttttataaaaatgtttatttttaatgatatgagaaaaattttgttaggccacaaaaacactgcactgtgaacattttagaaaaggtatgtcagactgggattaatgacagcatgattttcaatgactgtaaattgcgataaggaaatgtactgattgccaatacaccccaccctcattacatcatcaggacttgaagccaagggttaacccagcaagctacaaagagggtgtgtcacactgaaactcaatagttgagtttggctgttgttgcaggaaaatgattataactaaaagctctctgatagtgcagagacttaccagaagacacaaggaattgtactgaagagctattacaatccaaatattgccgtttcataaatgtaataagtaatactaattcacagagtattgtaaatggtggatgacaaaagaaaatctgctctgtggaaagaaagaactgtctctaccagggtcaagagcatgaacgcatcaatagaaagaactcggggaaacatcccatcaacaggactacacacttgtatatacattcttgagaacactgcaatgtgaaaatcacgtttgctatttataaacttgtccttagattaatgtgtctggacagattgtgggagtaagtgattcttctaagaattagatacttgtcactgcctatacctgcagctgaactgaatggtacttcgtatgttaatagttgttctgataaatcatgcaattaaaataaagtgatgcaacatcttgtaaaaaaaaacaaaaaaaaaaaaaaaaaaaaaaaaaaaaaa

SEQ ID NO: 1980 - DNA, 336 bp, Homo sapiens
  misc_feature 298: n = A,T,C or G
tggacgctacgggctcctggaaaggagacaccagcatttgccacaatgctgtcatccactgactttacatttgcttcctgggagcttgtggtccgcgttgaccatcccaatgaagagcagcagaaagacgtcacactgagagtatctggagaccttcacgttggaggagtgatgctcaagttagtagaacagatcaatatatcccaagactggtcagactttgctctttggtgggaacagaagcattgctggcttctgaaaacccactggaccctggacaaatatggggtccaggcakatgcaaagcttctcttcacccctcagcataaaatgctg

SEQ ID NO: 1981 - DNA, 515 bp, Homo sapiens
  misc_feature 31: n = A,T,C or G
cggcacgaggcgcgactgcgaggctggacgntacgggctcctggaaaggagacaccagcatttgccacaatgctgtcatccactgactttacatttgcttcctgggagcttgtggtccgcgttgaccatcccaatgaagagcagcagaaagacgtcacactgagagtatctggagaccttcatgttggaggagtgatgctcaagttagtagaacagatcaatatatcccaagactggtcagactttgctctttggtgggaacagaagcattgctggcttctgaaaacccactggaccctggacaaatatggggtccaggcagatgcaaagcttctcttcacccctcagcataaaatgctgcgccttcgtctgccgaatttgaagatggtgaggttgcgagtcagcttctcagctgtggtttttaaagctgtcagtgatatctgcaaaatcctgaatattagaagatcagaagagctttccttgttaaagccgtctggtgactattttaagaaaaa

SEQ ID NO: 1982 - protein, 224 aa, Homo sapiens
MRVSGVLRLLALIFAIVTTWMFIRSYMSFSMKTIRLPRWLAASPTKEIQVKKYKCGLIKPCPANYFAFKICSGAANVVGPTMCFEDRMIMSPVKNNVGRGLNIALVNGTTGAVLGQKAFDMYSGDVMHLVKFLKEIPGGALVLVASYDDPGTKMNDESRKLFSDLGSSYAKQLGFRDSWVFIGAKDLRGKSPFEQFLKNSPDTNKYEGWPELLEMEGCMPPKPF

What is claimed:

1. An isolated polynucleotide comprising a sequence selected from the group consisting of:
(a) sequences provided in SEQ ID NOs:1-1788 and 1790-1981;
(b) complements of the sequences provided in SEQ ID NOs:1-1788 and 1790-1981;
(c) sequences consisting of at least 20 contiguous residues of a sequence provided in SEQ ID NOs:1-1788 and 1790-1981;
(d) sequences that hybridize to a sequence provided in SEQ ID NOs:1-1788 and 1790-1981, under moderately stringent conditions;
(e) sequences having at least 75% identity to a sequence of SEQ ID NOs:1-1788 and 1790-1981;
(f) sequences having at least 90% identity to a sequence of SEQ ID NOs:1-1788 and 1790-1981; and
(g) degenerate variants of a sequence provided in SEQ ID NOs:1-1788 and 1790-1981.

2. An isolated polypeptide comprising an amino acid sequence selected from the group consisting of:
(a) sequences encoded by a polynucleotide of claim 1; and
(b) sequences having at least 70% identity to a sequence encoded by a polynucleotide of claim 1;
(c) sequences having at least 90% identity to a sequence encoded by a polynucleotide of claim 1;
(d) sequences set forth in SEQ ID NOs:1789 and 1982;
(e) sequences having at least 70% identity to a sequence set forth in SEQ ID NOs:1789 and 1982; and
(f) sequences having at least 90% identity to a sequence set forth in SEQ ID NOs:1789 and 1982.

3. An expression vector comprising a polynucleotide of claim 1 operably linked to an expression control sequence.

4. A host cell transformed or transfected with an expression vector according to claim 3.

5. An isolated antibody, or antigen-binding fragment thereof, that specifically binds to a polypeptide of claim 2.

6. A method for detecting the presence of a cancer in a patient, comprising the steps of:
(a) obtaining a biological sample from the patient;
(b) contacting the biological sample with a binding agent that binds to a polypeptide of claim 2;
(c) detecting in the sample an amount of polypeptide that binds to the binding agent; and
(d) comparing the amount of polypeptide to a predetermined cut-off value and therefrom determining the presence of a cancer in the patient.

7. A fusion protein comprising at least one polypeptide according to claim 2.

8. An oligonucleotide that hybridizes to a sequence recited in SEQ ID NOs:1-1788 and 1790-1981 under moderately stringent conditions.

9. A method for stimulating and/or expanding T cells specific for a tumor protein, comprising contacting T cells with at least one component selected from the group consisting of:
(a) polypeptides according to claim 2;
(b) polynucleotides according to claim 1; and
(c) antigen-presenting cells that express a polypeptide according to claim 2,
under conditions and for a time sufficient to permit the stimulation and/or expansion of T cells.

10. An isolated T cell population, comprising T cells prepared according to the method of claim 9.

11. A composition comprising a first component selected from the group consisting of physiologically acceptable carriers and immunostimulants, and a second component selected from the group consisting of:
(a) polypeptides according to claim 2;
(b) polynucleotides according to claim 1;
(c) antibodies according to claim 5;
(d) fusion proteins according to claim 7;
(e) T cell populations according to claim 10; and
(f) antigen presenting cells that express a polypeptide according to claim 2.

12. A method for stimulating an immune response in a patient, comprising administering to the patient a composition of claim 11.

13. A method for the treatment of a cancer in a patient, comprising administering to the patient a composition of claim 11.

14. A method for determining the presence of a cancer in a patient, comprising the steps of:
(a) obtaining a biological sample from the patient;
(b) contacting the biological sample with an oligonucleotide according to claim 8;
(c) detecting in the sample an amount of a polynucleotide that hybridizes to the oligonucleotide; and
(d) compare the amount of polynucleotide that hybridizes to the oligonucleotide to a predetermined cut-off value, and therefrom determining the presence of the cancer in the patient.

15. A diagnostic kit comprising at least one oligonucleotide according to claim 8.

16. A diagnostic kit comprising at least one antibody according to claim 5 and a detection reagent, wherein the detection reagent comprises a reporter group.

17. A method for inhibiting the development of a cancer in a patient, comprising the steps of:
(a) incubating CD4+ and/or CD8+ T cells isolated from a patient with at least one component selected from the group consisting of: (i) polypeptides according to claim 2; (ii) polynucleotides according to claim 1; and (iii) antigen presenting cells that express a polypeptide of claim 2, such that T cell proliferate;
(b) administering to the patient an effective amount of the proliferated T cells,
and thereby inhibiting the development of a cancer in the patient.
